United States Patent Application Publication US 2026/0275333 A1 - sequence listing, part 19

SEQ ID NO: 3045 - RNA, 64444167 nt, Homo sapiens (residues 38,666,503-40,814,641 of 64,444,167)
  source 1..64444167: mol_type = mRNA
ctgagcaggacaaggacagttaattcctctggtgttatcagctgggcacaggctctggttgcatagcaacccggattgctctctgcctctagtgttccaaaaaaaaaaaaaaagcattttctccaactccatgaaatggaattgggcccagggcagcccaggctccctgcccccaagtgtggctcatttgtaggaagctccaacccatgccctgctgtgggatccccactcttaaggccttcatccccgtcttgcctcacccatgccaggctgggggtaggaattcacccaccaccctactgctgcaatgtgaagctgggtcagaagtgaagtctcagtttgtccaaggggatgctggacaggcctgggatctgggtgaaaaggcatgaactgggggagcccagccagttctggcaatgcagtttacttattcattcattaagaaatatttattgggcacctactgggtcccatacccgtaaactccccagatttggtgagttaaagatggctgccaactctttgccactccttccatgaagaagtggaatccaggccgggcgcgatggctcatacctgtaatcccagcactttgggaggccgaggcaggcggatcacgaggtcaggagatcaagaccatcctggctaacacagtgaaaccctgtctctactaaaaatacaaaaaattagccaggcgtggtggcgggcgcctgtagtcccagctacttgggaggctgaggcaggagaatggaatgaacccaggaggtggagcttgtagtgagccgagatagcgccactgcagtccggcctgggcgaaagagcgagactccatctcaaaaaaaaaaaaaaaagaaagaaaggaaaaagaagtggaatccatttcccttcctcttaaattggggctggctctgtggctggtctggccagtggaatgtgacagtagtgacaccgtataactctgagactgagccctaagaaattagcagattctacctttgcggcttgaaatgctccttcttggaacaccatcaccatgatgtgaagaagcccaagcagccacgtggagcggccctctttaagtctgtatcatttaccagttgcatgagtaaagccatataataccatgtgaagcagaagaatcctccagctgaaccctgaccaggtccttgacccacagaatcatgagcaaataaaactattctccctttaagctagtaagctttgaagtagcttgttatgaaataatagataaccaaaacaccaggagagcttagttttccattcatagattctcaaataccaacacatgtggtttaagtacctgatgtatgctagaccctgtgcccagttccaaagcaaaatgccactcacgctggggaactggaggcatcaggagacggcacagaggcagagagcagaaccaagagcccagagataagagcagacaattaaatagaaaccacctataattaaaggggtcacaaaataaggtggggaaggcaattttcattgctactcagaccacacagtgttgaattcaggtatcaactctgcatatttggaaataggtgcctgggccacatgggagggattctgaggtgaagtctgagctccggggtgatggattcatggtgtctacagtagttggggagaggagaatgcaggtacctgtctcatgcctgtgcttcttgagcccatgctgtccgctggcctctgtgactaactcttctgcacctacttagacaaggagagaggcgggaaaacaggttgttcaggcaggctttgtgggggctagagcagagaggaccccaggcatgcattcatacttttcaaactggagttatagacctccttataaaccagcagggcagcttcagagggttagtttttagtttagtttagttttgttttaaaatgtcttctagtcaatttagttcaaaattccatcatcttgttctgtattcctgggtcagactttcacctggctcttttttttttttttttttgagatagagttttgctcttgttgctcaggctggagggcaatggcgtggtctcagctcactgcaacctccgcctcctgggttcaagtgattctcctgcctcagcctaccaagtagctgggattacaggcactcgccatcacacccggctaatttttgtatttttagtagagatggggtttcaccatgttggccaggctggtcttgaacgcctgacctcaggtgatccgcccgcctcggcctcccaaagtgctgggattacaggcatgagccaccgtgcccggcctctttttaatactgatgtctgggctctacccacccacccgcttcatgcttgggagtcactattttacaactcctcagctgattctaacatgcagccagggttgagaaaatagcgcctaacccttggagacacacagctgataaaaggaaagtcttcgttctcaagaaacgtctaggtttggggtggggagtcgggggtaagtaggaggcagttgtgtgctgaaaacgtttctgtgttccagggaaaaaaggcttgatttttagcatttgctgatttttgtgatatagatactttcactatggccgatttcaagccaccaatgtgatgtaactgaaagctgggttgggatgagaggcacaatggcacaccacatactagaggcaggcacatccacagctcatgacaacgctgggtgagaagggctgcagttactttgcactggaccagcatcagaccagcagccttggcaccacatgggtgctggtgagagaggcagaagctaaggttcaccccaaatcaactgtatcagcatttgtgctttaaccagatctccaggcgattcatgagcacatccaagtttgagaaactctgctccaataaatggatctgtaaaaaccttttctggggcctgacatggcatggtggctcatgtctgtaattccagcactctgggaggccaaggtgggaggatcacatgaggccaagagttgaagaccagcctgggcaacaacatactgagacacctgtatctacaataaaataaaataaaattagctgggcatggtggtgagtgcctgtagtcccagctactcaggaggctaaggtgggaggatcccttgagcccaggagtttgcggctgtgacgatcaatgattgtggcagtgtacctcagtgtgggcaacagagtgagaccctgtagaaagaaagaaaagaaagaaagagagagagagagagagaaagggagggaagggaaggatgggaaggaagggaagaaagaaagaaaaaggaagaaagaaagaaagaagggaagaaagaaagaaagaatgaaagaaagaaagaaagaaaagaaagaaagaaaagaaagagagagagagaaagcagatggaaataaccatacctagaagggtcagagaaaccttcccaggaagagtggcataagaattgggtttcaaaggatgagtaggagttttccatacagataagaggtaagaatggggaaaggaattgttgagagggatgagtatggacaaaggtatagagtggggaaaaagtggtgtggagagggcatggggtgtagtgggaggagacgaggctagagaagtgggttcccaaagtgtcacctgaccagcagcatctgtgtgctggaaactcttgtgaaatgcaaattatgaggctcccctcctaaatctactgaatcagaaattctggaggtgggactagaatctgtattttttattttttatttttattttttgagactgagtctcaatctgtcacccaggtggagtgcagtggtgcaatctcggctcactgcaacctccgcctcccaggttcaaacgattctcctgcctcagcctcccgagtagctgggactacaggagtgcgccaccatgtccagctaatttttgtatttttagtagagacggggtttcaccatgttggccaggatggtctcaaactcctgacctcaactgagtcctgatttctgagagacagacaacggcatgtgtgtgactgacaagtgggctctgctgagcaccgatgggtttgctgatgggacagttatggagaagaaatctcctgaaagcatcctccaccttgaactcaaactcactagtgaccttggctgagatgtcacttcctctgtaaagccttctccctgccagccactctccatcgctgtgaccccactgcctcctcagccctccccattacctctcaagctgttctctaatggcttagctgtccttccagcacaaggccaggaccttgtacatcttggtatgacatccccagcacactgcctgacgttacccccattccagcagctcactcttgattgagtacttactgagtgtgagcatcatgccacgggctttaccggagctgtgtcatttaaacctgagaactgccctatgaaatgggtactattgttgtcaaccccattttacagatgaggagactgaggcacaggaaataaaatacactgctcaaagccacatggctggtaagccacaggcagcctgcctccaatagacaaacacattttgttgttgttattgtttttgtgcttgttgcaggaagggagggaaagggggagggaaaagtgggatttcctgagcatctttatcacccatgaggtccacagtgccctcccagactgctggctattctcccttcactctgagggacactgcggaaggacctggaagagctgagccttgtccaggagcagtggctgctttatttagggcctaatgagccagtgtctctgctgtgactcagccacggcccaggggtctccagggagaggggactgtctgcaggccctggctagcaactctctgctaacagcacctttcagctcccgctctctcagctgctgtagccattagtgctgaaattagcatcgtaattgccttttaactattcttagctgtgaaagagaccaggctgccccgcctctccctccctgcctagagagcagtgttggcttcccttcctggatctaaggaccaccccctgtccacactcccgagcctcagtttcttcatcctccaagtgagggtgataatccaagcttcaaaggcttattgtgatgcatataaaatgcttgtcatagttcctagcacactgtgagcaatgatgccagttgttgtgtttggagacccaggagtgcaaggatatgtatgcaagtccatgtcataaccagcgttagtgctcaggtccttttgactctgagcttagggctcttcctgtcccaccgtgtcaatccttaaaatgtgcctttccctgccaacaatggcttgtttgtaggctgggcagtcactcttgtaatcccagcattttgggaggccaaaggggaagaatcacttgaggccaggagttggaggccagcctgggcaatgtatcgagatcccacctctacaaaaaattttaaaaattacatgggtgtagtggagtgctcctatagtcccagctactcaggaggctaaggtgggaggatcacttgagcctgggaggttgcagtgagccaaggtcacacctctgtactctaggctggacagcagagtgagatcctgtctcaaaacaaaacaaaacaaaacaaaacacaatcatatgagatgacagtaaacaagatcttgcctgaaaacattcagctttgtcatcataattagaagatttttactacaaaaaaatcaggcctcggtgaagagaggggactcaccccaaaggagttgcaaccactgggtcatctagtttgccctcttaaaagtgtgaacactaacttttgatatgcagcaaaaggttgaagggacggatgatgaagcccagctgcctggttccagtccagttctgccactccccccagggtgaccttaggccagttacttaacctctctgtgcttcggcttcctattctgcaaaatgaggataataatgcctttccggcaagtgtgttctgaggtatgaatcagtcaatgtagtgaagcacctggcacagcagtaagacacagtgagaaccaggtaagtgtttgctcttattactcattaggcatctttacttacttgcttgtgtggcttctaaactgcagtttggggagggggttctgcaatcatcagcagcaaattgtttttaggccagtcaccatcacatggacgatgttttcttacccttggtttagacttgaatcccaatcaggccaggaggggagatccccaggctgaccccgtttaaggtgcaaaaactgaggcttgagaaagttaagtaactttcccaagatacacacattataaaaagaggagcctggccttgaattcggtcaagtctccagtgctgggcaccaagtagcaggcccctcagctggccctgcatcttcttgggcctccccataacccctgtcagcaatccccgtttaatgcgaacaccatatccttccctcctggcggaggcatatctggcagtgcttaaaagcacaaataagctgagattgatatgaggatgaattgaattaacatttatacgaccagtacagggcgtggcacaggatgagtgctaagttagtaatatttatgatgatgatgactattactattattattctgagacagggtctcactctgttgcccaagctagagtgcagcggtgcaattaaggctcactgcagcctccaccttcagggctcaggcgatcctccctcctcagcttcctgggtagcttagactacaggcgcgtgccaccatgcccagctaatttatttatttattttgtagagaagaggtctcactgtgctgcccaggttgctctcaagctcctgggctcaagcgatcctcctgcctcggcctcccaaagtgttgggattacagatgtgagtcactgcacctggcctattattatttagctcggaaaatcaaccctaatgacctcaccggatacaccacttccaggcttggattttaggttccctacacaatttagggctgtgtcctggctttaaatatgtaaatgctgctgtgagaaacacatcctcgggagggagaaggggtgggctcagaacctaagactttccaggaactcagatggggacttgggaaagctgtaaagaagaggtccctgatcttatgaagtttatggaaaactacctaattacaaaattacttcacgccttgaaaaagaacggaatgaacaggacgctatcatacagaataacggaggggtggggctccacttctgatcagagggtcagggaggacctcttggaggcggtgatagttaagctgacacctgaagaagccagtcatgcaaagagtgggtcaacagctttccaaggcagagggaatcaggaaagcgatgggcttgtctgaggaacagaaaggacaacgaacgtgtgagtcacactaaggggcgccgtggtgcggcatgaggctggagcctgatcactcggggtcttactggccacggtgaggagtcagggtttcatgcgcccctgcagtcagaaagcatggcccaaccccagtgccctaagtccggaaacattcaaagctggacccagggtagcgggatccggggcctctggggacccgagagggacgttaagttcagggcttcagggtgcagccctggggtcggtacccccagcctccaacccagagctggcagcgctcgcccccttctccgcgcgggccctcagctcagctccctcttcgctccccgtgtccccgcgagcgggagggaggggatgctaggacgccctgtcggcgtcgtcgccgctttccgccattgtttagtcgtgatgctctcattttctctgaatcaacaattttctgctcggctccgcgccgaccggcgaacgcggggcttttcctcgcccgcctgatgacagcagagcggcgcggagcagctggtccggaaggaagcgccaggcgcctgcccggtcccaggcgtccgctgccgcccacccacaccagaccccgcccccgcgcgtcaagccccgcccatccataccaagtcccgcccccacaccctcacccacacaccaggccgtccccaccccgcccccagagccccggggcgccccgcccgctagccgcgcacgcgcagtgagcacggcgacccccggtggtcgggtgtctccgcaggccgaacacgctgctcgcccagctgcggatcattaccgcccttttgttctccgtcgcgcgctcgccccacgctaggaatgcaaactgtaggcgccgccagcccccccttcctgtttccctgggtgggagtgggaagggagttttaaactgaattgtgctcagactcccagcccagtcttcccggagccatccgttccttcatccaatgcggacacccatatctaaggttcgggcaggatttccggggcaccctcaaacccagcccgtgggatccgggaaggcctcctggaggagagtccacgaggcacggagccgaggatggggttggggttaggtcttggagggcttcgaatttccggcaaagggtctgggatggttcttgaggacagcagggatttgcagggaggctgggggtggaggtgggcagaggtcttgctcacatttgtgttctacaaaggtccttttggcttttgggaggcggagactgagactggagtccagaggaccaaggaggacgaggtaactgccgtggtccaggtgggagaaaatgtcggtgaggtcttgggggatagaacgcaaaagaagactagggagtaaaatttacagaaccagtggctagtcaagtttaggggtgagggggaaaatgaggacacccccaagattctgacttccgtgaccatatgggcggggggacgtctcctgagaaactgggaaggaatgagggttgctgggctgagcagatgagggagacctcgttctcccacccccttcctaaccttgtactttccacacctacgtaagtaggccctcgtttcacacaggcctctgttcagcgtcccttcctctgagaggcctttgctgaccaccttttgtaagaccctccccatccccataccctacccactgtttcttcacggcactgaccacccaaagttgtatttggatttgtctattggtttcttttctgtctcccccacaaaactgtgagctccttgaggacaggggctttgctcggttctttgcagtatttccaggacctgggacaccattgcctagtctctgcctaaagaatgcatgaatgaatgaatgaggcagtgcagggtccaggccttgctggttcatcactgcattctgagctgagcactaaatagcaatttgctcaataaatgcatgaatggatggatagttgcttcacaacctagtagataaaatctaggccgggtgtagtggctcatgcctataatcccagcactttgggaggccgaggtgggtggatcacttgaggccaggggttcaagaccagcctggccaacatggtgaaaccctgtctctactaaaaatacaaaaattagccagccgtggtggtgcgcacctttagtcccagctacttgggaggctgaggcaggagaatcacttgaacccaggagtcagaggttgcagtgaaccaagatcacaccactgcactccagcctgggtgacagagtgagactccgtctcaaaacgaaacagcctggtaggtaaaatctagagtcataatgtgaggagcagtaccgtgagataccatcaggataatggattaataatagcccatgtttattgagcgcctccttcacaccagggctgtgttgcctgctgcagatgggttatctcagttagtcctcatgtcatccctatgaagtaaggactcttggtggctccatttacacacatgaggaaaatgaggcccagagaggttgaatgatatgcccaaattcacacagctagtaaacggcagggccaggatctgaacctaaggtggttgcactattaccaagtcacagcacagtacatggatgctatggcttggtggaaagggtcaaaagcatccccacacccagtccaaggctcctcctaacttagatgatttcttctcaaagggtcagaggctccatgttgccccagccaggcccagaacagcagcagaggtctggctgagtagagagatgctgatactaagtctacctggccagtcctcgactgtgggaccagcactccacttcatgtgtgtgttataacattcgatcttcagagcaaacttggtgaggccctcgcggtaatcattcccattttccagatggagaaagtgaggcgtagtgaggtaaaccagcttacctagggccacacagctattgtgtgggacagctggtgtccaaacccaggcaggctgattccagatcccacctctgtgcttcctttaagctgaccacagcaggaggctggatgaggccaggccagctcaggctggccattctcagtgccagatggtggctgccaggcatggctggagcggtgtttaccctgtggccattctgcctctgcccattgagagggcagccctctcaatcatcataaaccgaggctgaaccaagatagcaaatccgcatcctccatcccctgtcactggacatcctgtattcaatcacccacatattcatttcttctaatctttctctcttgactgtgataaagtcacttttatagtgctgagaacgtgcagttcatttgaattaagtctgctggagtagattagtttgtgtgggaaaatcagggctataaaagaaggcatatttcaatggttcttttaactgattatgctctagggtcttattgtaagaatctcatttggggtgtggggtgtgtgtgtgtgagagagagagagagagaattgcacactcacttctagaaccctggagtgctgaggaagaccacctagaagcctccctataggaagggtctgggcttcccttagagaaatgatgaagggaactctgctattatctccatcaggtggtggctgcccaacctctggggaatggggcagataattcactctcatgtaggagggccctaaaagacttgggtgcagctgaagatgatcagctcatgcccaacagagtgcaatggcaaagaaaagtggactgatttgaatgcctccagagccccatctgggaggagagggtaggcagacattgccaatctgagggttattatgcagttactgtctgcctttcctgggagctctttgaagatagtcctgttcatcactgtctgcccagtgcctgaccctttggaggccctcagtaaacatttggtgaatgaaaggatggagagaatgaggagagctggccatcaacaccagctgtctacctgggccaatagagaagttgcccctaggaagggtagacccagcaaaggtccagggcatcagggtttccagacccagcagctcatgcttgacattcaagcctcagaagcaactgtcttcaagggactatgtgagtttggacaatgagcatttcagcagtggccagtggaaatggaagaaaagaggattctccccacatgacctgctctggataaacccttgtgacctttcttccactggcaggggtaggggtgtggtgaagaagcttcattaggacaaattaatttccttcttggccaggtggatggggatttaaaactgaccccatttgattcaaagaaataagtgatgggatgattctggctcctaaaattatggggttaattcaacttatttcaggagtattaaatggggttgtacaagtgcccctggtcctaggagaacctcttttaagttcctccacctgtcaagatgactactttgttacaagagctagaatctacaagaggccaggtctgctagggcctcccaactgatggtacaacagacaacctgtggctgaagggagagaccttctaaaacagccagccttggccagagctgtcatgtctaaggacagcatgtcactagttcccccaggcccctctgcctcagcaccctctcctctccagttacctcctactctctccctccagagaggaattgcagcatggggtgattgatggctatcaggtatgtgattatgcatgtgtgtccaaacccacctatgtgggcatgctctgtgcgtttgtatgtttgctctctgtatatgagaatacgcgtgtacatgaacttgcatgctctgttagggatgtgcttatgtgtgtgtgcacatagagtctaggttctgtgtatgtgtgtgcatgtgtctctgtgcatgtatggactatcacatatagtcacactgtatgtgtgactgtgtgaccacaggatacagggccctttgatgatagagggaactcccccaccacctcccctgcacccagagcaagagggcttgtgttggcaatggactggccttctgtaggaaaagtccacccactgaggggcctaggtagatctagtcacagcctcgcattagctgcttccctgcctcagaattctcctgggtggtcaagccacggagaagcaagtggctcccatagcaggaagaaacagtgacaatctcaggtaccctgtctgaagggacagtgtggtcctggcctgtggttgttcaggattctagtgtatagatggggtggtaacttccaagccatccaccacttttctctcctccaccaatgcaggggtaacatccatcaggcaaggtgctggcagttttcatcctggctctaagtccttaggaaagtcatgtcacctctctgagccttacttttctcatgagatagaaaacctcacaagattgttaagaattacataaaaattaaatcctgtgtaaaatgagaaaataccttctgactagccacttcctgagggcatgggcatgtcaacttatcttcgtgtcctcgtgctttgcctgggatctggtgtatggcaagctctcacctcatatttctataaacaattttgaaatatgtaagcctttgcagcttcccaacataaattcattcactcatttattaattcagtacacttttatggagcatctactatatgtttgacactatttggggtattgggaatagagctgtcaataaaagggcttactttctagtgcacattagcatactaaaggctctgagaagtccagcagtaccaggtttctgataaactttgtttaacccagcagtctctgtgtttaattatggaattccccacacctctttcaaccttttttttgctaatatgcaaatttaatcctgttccattcctcattacctgttacactcccaactctaagccccttcagaagggctatggaatataataattaaaacaactactctggagccagacacctgtgtgtgtgatcctgggtaagcctcaatttattcatgtgtaaaatggtgataatggctaggattaagtgagataatgttgcatctccaatgctcagcattgtgcctggaatgtagtataattcatttaaataacacctatcactccaggtctcctcaacacctatgaggtaaggccaattgtcctacatgatacccaatgccctaattgcctccccagagttatctgaaatcattctcctccaactctcttttatgagctggtcattcggaaccacttgccagttcccatggctctcaaacagccgcctgttgtttcatacctttgctctcatgttgcttcctcttcttaaaattttcttctcagtctttcctacctggagaacatacattacattcatctcccgagtcatcccctaatcacctcctccattaaacacgtactcactgcctgatccttcagccccaactgatccaccagccaactgtatttgcatgagttatccaggcaagaccagtagaggaatcacccagttcatctacagaatcatgagaaaataatatgtcattattgttttaagcctttaagttttggaggtagtttggtatgcagcaatagacaactaatgcaagctccttgaggccaataataactaacttcaactcatcttcatctcgcaccttgtcattcagaggagtacatggggacccctaggaccattggtgaagccaggagagagtgaatgcccttggttgtctccattccagactagaggggggataaatgagggacctccactaaaacatcagtggaaggaccctaggaagaatgaactgtctagagaacagaccaacagatcctcagcggacactgtgagctgtccagggtcctgagtattctgttctaggggaacacagtgccatgctctgatctgcccactcctgtgccagggtcaccctactcaagacccgccctagtgattgttatgctgacatctgagagaaccagccttatagtgggaatagaggatttgacatctgctcaaatggaattgaagttgattcttacaccttcacccttccttctcccttccaccctccctctcaggaacgatttgaccattataataaaaatccagctttatgtaaataccctatcctccaagtaataaatgccattagctgagcctgactgagcaatcgcatgcttttaaacatccatttgaagatctttgaaagctctctcgaggctcttgctcataattcactaagtgggagttggtaataactgtgttaaatggccaggccctgcaattcgcggaggtgtgtctgtttgtgtgttggtggtggtagtggcagggggtgctgggaagaggatgcccttccttccatgctgatcggttacttatttttaagagtcccactgggggctcacagtcctttgatgagctactaatgaaagagccagatctaacaattaatttccccagagttattatttattgttttggcaacatttctctgaaaagccttaatactcacctggcttcctgatggttgaggagaaccatgggttgagaagagaaattagttttacctgtttattcaacaatcatgaattgagcacctgtgtgtgccaggcactgcactggagcaagatacacccctgccttcagagagtccccagtttggtggggggcaagatagggaagggagcaggcataacaatacagtctaatacctatgatagaggggacaatgtagggggctgtgggagccaggggtggcacatagccaagattgaaggagtcagggaaggctacaagaggaagagtccttaatgatgacctagagctaacaagataaataaaaaatagggaaaggaaatactgtgagaagaaggaccagtatcttcaaagactcttagaagagaaagagcatccataaaattctggtgagatagtgtagtactgagaactttgtcactgctggtgggagtgtaaatttgtatagccatttgggtaaacagttggacgctatgtagtaaatttggagatatgcaagcccttcaacccagcaattccatttatgtctagagatacttctgtatgtatacaacattaggagacatatacataataatcagagcagcatggtctgtaataggcaatgactggaaacaaccaaaaacctatcaaaggcagaatgagtaattgtggtgtaatcatacaacagaatactatacagtagtgaaaatgaatgaaccacagtacacttcacaacatggataatttttatattgacacaaatacatacaacatgacttcatttatattaaattcaaagcagataaagctgaaatattgtcctgggatatttactaaggtggtagatatataaaagaaagcaacaaaatggttgaccatagtgttttatttcagggggaggaagggacatgattggggtggatcacatggggagtctcaggcgacatatatgtcttgatttgagtggtgctcacatagatgtttagaatttttaaataaattgtgcacatttatatcttttatatgtttctaagcttgtgatatatttcaatatttttgttaaaagaggcaaaaaagcatcattgtagcctgagtcactgggtccttctctgaacataactgtgagaagcctggcacaccaatgggagggctgagggtggctctcaggggaccctctggtgccagcatccttcttggctgtgtttctgtgtggtgaataggcaaccccacaatggcagtaccaagggccacataggatctgaagttcttttggatgcttcttagatcatctccatgagatatggcatggctttgtcatccagaagaccaccagatggctaaacagtaaaaaagagctttataggtaatatcagtttgtaagctgggaagagaaagtctccagcatggattaaaggtgctctctctttgaagagagaaaggacaggttggattttctgcctcacagcgtccatgttacacaatagagtcatacatagtcagcaggtttaggggaaaaggtatatacattcatgaggggagctgagcacatccacgcacactaggtaaatatgtatgtaacatacatcccatgttcactttggggtggggttttagcattaaaatgaggtagaatttggctctttatatcaaaaggtgaactataggacagaaagatagtttgcacacagcctctataagctagctgaaaatggcttaaggtctgcaattgcttatgataaaagaatgcaagctcagtcctctgtctagtcagagctgtagtggtctgggttgtaaatcagagctaggaggggtctgatagctcctattgttagggagcttagagctataggaatttagaaatgtgccaggccagtcaggacctgaacccttaaccaataggtaactttgtttccttaacgtttgggttcatcttagttgataaaggggcatctattttggcctctcagatctctccttagtttccagaggaccccacatgggcctgggtgtgagtttcacagggtaaaatggagtcaggtgatgctctgggagaacctgagaagagagacagcattgctttgtctttccacttgcaagtccccaggatgggttaggattgtaaggtgctatctggccccaaaatccaacttcagggcagggtctctcctagatggactctgcagtgggcacactagaatgaacattgccatgaggatcttgcctggttccaggtgactctgaatctttaacataaatggaccttgatcccaatctggggaagaagatgggtgttcccaggttgtagcagctgggaaggatctcagtggtctcttgtatccagcccttaggactttttggcttttgattagctctcaagccaactttatagttgttcatttataagagtaatatattctttcagaacaattatacaatgtggaaatgaatatagaaagtattatggtttcccttataatctcatgttgcaaacaaacaaacaaaataaacaaacaaacaaaaaacaatattaaggccgagcttggtggctcattcctgtaatcctagtactttgggaggccgaggtgggaggactgcttgagcccaggagtttaaagccagcctgggcaacatagagagacctggtctctaagaagaatagaaaaattagccagatgtggtggcgtgcacctgcagtcccagctactgggaggctgaggtgggaggatcgtttgagcccaggaggttgaggttgcagtaagccatcacacacaaaaagtaaataaaaataagaaaagaaaagaaatcaatattaatagtctggcatattttcttccacacattattccaagctcatacacatatgtacaaacacagtctggagctcatacacatatatacaaaaacagtctggagctttcttcttttttgtttcgaaaaatgggatcatgctacgctcattactctgtgatttgacatttcacattataatagatcatggatatcattcaagatcagcccttccagatctaatagacttttttttttcaatagctgtataatattccccagtttggatgtagcagaatttactcaacctgtccgctgttgatagacttttaagtaatttccattttttgccactacaaataatgttcaggaaacatccattgcttatatctacatgtcctaatgcatttctttgtgtaggataaatccccaaagctaaactgtgagtgaaagaatgcacttttctattttaacaagtcctgacagattactttctcaagatgttgtagtctttcacacttccaccaatgacataggacattctcatttctctacaccctacactggctgctatcaactcacaacgttctcttccctcaatatgatgagcagatgagcaaagcagaaaaacagcagaaataaaaacaacaccaaaacttattttattctatttgcacttatctgattactattaaggttggttattttctcaaatgtttgttcattgtttgtattttcttctccaagaaatgcttattcatatcacttatccatctttgtatcaggtggtttccctttttattactgatttgctgaagatctttgcatattaagtgattaagtgtgtctcttgcatgatccttcatttataaagatagaaaatgataaatgataacagaggggaagtgagttgtccaaggatatgagaatgcaagtgtcagtgctagacagggtcatgcctctagattccctgcccagggtttaatccctggcccgctccatagctcagacccttgtggacaactttctgggaattaccagaacacattttctcagagtatgagctaaagacttccttcatcagaattatctggtgcttcattaaaattcagattctgggaccacatcccaaacctatttattgagtcagaatctctagaagtggggccaaggaatctagattttaagagagctttttagattgtccttgtatccaccaaaattagagaacaattaccccagaaactcaaagtccttgcagaggcactgagtgggaagagaggggtaggaaagctaatgggaacattgtgtagcgactcccaccaccaccaccaccatcaccaccagctgaagaaagagccctcaaggttgaagcatcaaaacagagctatcactggggaccttttggcctaattctgcccttaagccacaatcaagcctttgtggcagtaggggtgaatgtaatatatcactttcttatcggtataaaggtgtaaatgtcaatttctcctcctttttgtgaagatttgacaaagcacttagagcgacacccattttaatcaacaaagcagccagaaagatcacagggcatcaagtgtgccatatcctatctgagctttgggtggatttgaaaattgcacttttaattaaaattggcatttccgcagctcagattggagctcgccgttttgctagggaattgcaaactgcgaggcaaacaatctgagagggaggtttaagaatacgaagaggaaggcttgtgtatgaacaggaggcgcttgtttaaataatgaagcggagaaaagataatgtaaaaatgcctttgtctatgtttagttaggtttcctcagagacccgggtaattgcggctgagctgtccgaggtgctgacggctgggcgagaggagcggttgaatgtatgcacaacgcccagaggtaaatgcctggtccacagttctcagcccaatcaagtttgccctgctttatgggtttcttcttggccaatgacaaacaaacttccaggcaggtgattagtaacttttgtggattgaacgaatgaatgattgctgaccacctactatgtatagtatatggtgctctgaaaaatgggaaaaatgtcaaccgaaattgttggatccttttcttgtgatgttgcagtcaacctcacaattgatcttgttgtgagatttcaggattttgtgaaccagaaaaattgcaagccatcaaggacaatgccaagcgaagacatttaagagtaacaactatcacctgttctctccaatgcttgaataaaacaaaaggcattttaaaacttaataagtaggaaagccataatctcagaataaggaacagttatttagaatggttttgtaaaaacttccttgtttgcccttttttctaatttcattgagaaacacaggaaacatcaccatgcattgtcatcagcttcaaaactggcatttgggagtcattgatctgggtcctcaggaaagaaatagaatctctcaaaaacatgttaatcagaggcgctctgacttctggctgcacatctgatctccagggttagcctgttttacagttttattagaaagttctttccatagttacagtgccttaaatatgtgtgggagagggtctggggggtaggcggatggattaaaattgacacttgttgagaacccactgtgtgcaaaaacttaaactgtcttaagatgctacacttaccttatcacacataatctggtttttgccctcatttgttagataggcatcattaataacccaatttaaggatgggaaagttgttacacatcagaatttaatttataataaaagaactttcaaagatcaacttagaagggaacaatttgtcaataatggtataaagataattgatgagaaaaaattattttgaccttcacaccagagcagtcattaaatacattccaactgaattaaatgcctaggtgtaaataatataaacatataacatatttttgtgcttcttttttttctttgtttcttttttttaaaaaagggatacatttgcagaacgtgcagattggttacataggtatacatgtgccatgatggtttgctgcacctactgacctgtcctctaagttccctcccctcaccccccaccacccaacaggccctggtgtttgttgttcccctctctgtgtttgtgtgttctcaatattcaacttccacttatgagtgagaacatgcagtgtttggttttctgttcctgtgttagtttgctgaggatgatggcttccagcttcatccatgtccctacaaaggatatgatctcattcctttttatggctgcaataaaatattttttaaacatagataaaacccagaaaacataaatgtgggtagtcatcagatatcataaggtaaaagggcttttcaaaacttagcaacaactgaaaaaaaaaggaagaatgaacaatgttaattgctgggatgaaaggattctattagacttaaatctccttttgtaaaagttgatattttgcaaaaatgaacatttcaaattaaaacagtgaaatccatagtggttacttctggggtagagaagttgaataggaatcttatggggaaaatgttctctatttccatatgggtgaaaattaattgaactagatatatatttgaaataagcacactttactgtgtacttataccttgattaaaaagtaaaaacagaaaacaaagtgaaaaccattctaaatgcaatatctctgttttgaactaccgaggggaaggatatcaggttcccagggtagtaaaacctcttgaaaccattgtgtgttgtgtgaatacagtccactgatttaaccctagtccacatgaaaaagatttgaagattctagttgaccacaaactctagaatgtcaatcatgcaactcaattagtatcaagaaagcacacaacccaaggttttattgctaaaggcatagagctcccaacaaaggaagtaagagacacctagcttaggaccatttctctgacagactgggtaatttttgaataaattaatgaaactgattgtctttcaagacaatatgtaaggacagaggcaatccagcctagacgttggagtaatattggcctggatttcaattccagatctgccaactacatgttgtgtgaccttaagaaaataatgtcatttctatgggctcagtctcctcatctgtaaaatggggataataataatataatcactgaaaggctgttgtaaggactaaatgaggtactatatataaaactctcggtgtagcgcttgacatattctaactctcccacttcagtgacagtttttactagtggtattaacaatgagttccagggtgggaccctccttgtatgtcatctccatgtgattcctaaggaagtttgttttctggggagctggggaagttgtacaatctttgctaagaaaaccaagttgcctcctgccacccacatctcaccactgccctagagataccccagatctcttgtggtcttgtttcccagtgtgaactgctgcaatcagtggccaaggctgcaagccaggcagggaaggggactgtgcaggagacagaagatgaagaaatcgggaatccggcacagcagcgacaggagctcattgactcctccccaagggccagctcgggaagctggagaggcctgtcattaactctctttattatctacattttctgcctcactggctcatctgaggctgcaaatgggactcactccttgcacgaaccttgcttcattggattctggaactgggaggaactgaatcacggaaaacatttatcaacttgggggttaaatgtgggagatagggaactgggtgtgcacataatatggagtttgtccttggaacttatcctaaaaggatcatggtagtttctaccctaccatggcttcttctgaacccagagtctcctaccactgccatttggaggatcagccatgccctttctagccagattcatatagctcacctcttgcattttaagaactgtgtctatatggtagtctcctacaagaacaggagcagtgtggcatgggtttatagatagtcatgtgctgcttacaactcatgagaccttagactctctgagcttcagtctctttctctgtaaaatggggatgattacatgagccttgaagtgctgggtaaggattaataatatcatccttctttattaagcatttaccagactgtaagtgcttgaacatgagctatctaaatccaattctcagaacaataggtaaatactattatcatccccattctgcagatgaggaagctgaaacacaggttaaataacttgcccaagataacacatctctctcctaaccttcctgcaggaaactcatctattcccatgacttacaagatcatccatagacaacagctcctatgcttattttttcagtcctattctctcttctgaggcccagcctacttgacttgtcaacttggaggtttaacagatctttcaaacccatttctcccaagcagatgaagacactgaggcaacttgttcaaggtcaaacaactagagtcatcaagcccgaatttgaacctggatctctctttatctgcaaaggttacactgctgagcacattctatctctctatgagttggtactctcttcaaaatatccctgtcagtcagacatagtggtgcatgcctgtattcccagttattcaaggggctgaagcaggagagtcacttgggcccaggaattcaaggctgcagcaagctatgattgtgcccatgaatagccattgcactctagcctgagcaacatagcaagatgccatctttatttttactttaaaaataaaaataagtttaaaaataaagaaataaaagaagacccttttccattctgtagctcataccctaagtcatatctaccagactgctgtgatactcactaaaccatgccaactgctctctcccccaagctaaagaggccctgagcaccagcctcaggatgtgccaagaaagaagctatccataaggacagagggaagccccaaagagggctcatcagagaaagtcatggggaagaagagctgtgaagccatcttatctccttccatcaaaagcccctgttctggctgggtgcggtggctcacgcctgtaatcccagcactttgggaggctgaggcaggcagatcacgaggtcaggagatcaagaccatcctggctaacatggtgaaaccccgctaacacggtgaaaccctgtctctactaaaaatacaaaaaaagtagccaggtgtggtggcacgtgcctgtcatcccagctactcgggaggctgaggcaggagaattgcttgaacccgggagacggaggttgcagtcagctgagattgtgccactggactccaccctgggtgacagagcgagactctatttcaaaaaaaaaaaaaaaaaaaaaaagccccgttctgtagctcaggaattatgtccttgaggatttaaatgtgtgtgtgttggggggagggggaagggtgccttagggaggatctctgagcttcccccaaagagttacagtgtatggcaactcttatttatcaaggctgtgtaagccttcctccatctgccaatcatctaccttcttcccatccagtgttaatctccctagtagcacatgctctgtcatctccttgtacactgagtgttatcttcagtgtgaaacacaggctcaggcactcagatcaggctatgctacaaagtaatgaagcacttcttatttccaaagaaaaatagatggagaaaactcatccttaattaataacatgtggcaagtatctgccctgtgtgaccacatggggcctccatgagttccctgtatggtctagagagaaaaggggattttcccaaggtcatgaaaagttgacagcaaagctggagcttgactttgggggctttctgattattatctttacctcagatcagccaaacacacaaggagtttcctgagatagccttgcatgtgacaatctcagaggtccattttcaagcattcaagtcttgccccctcctcaggaatcagccacagtatgactatgggcagcaagtcagacctcaggtcttccccaaatagcccattttttgcctcatggaagcaaaccatgccctagctggaaaatccaaaaaagtgttttaagctaaaaaatgaaacccagtactctccttttgcaaacataggggcatgtaaaccagtaagtttaagaagccaactcatactaaaaattcaaaaagatactggatactcaaggtgaaaggaggagatcagaaaggagtgaaatggaaggaaagttaagctgggatctacttcctcccaaggttacagacattgctatcagctggcagtgcaacttcaggctagttattacacctcattcatactctgtttcctcatttgtaatatggggaatctgatagcaactatgtcataagggtggtgggtgggctaaatgagttgagttctggcatataagtaacttagcatggagcacaacaaatgcttactttgtgtttgtcgtcattgcttccaagttccttctttggtctctattggtgtggagtatctcattgcttttttttttcacagattttcattctgtcacttaggctggagtgcagtggctcaatcatagctcactgcagccttgaatttctgggctcaagagatcctccttcctcagtctgccaagtatctaagaccacaggtatgcaccactatgcccagctaagtttaaacaaattttaatttatttttatgctattttatttattgtgtagacagggtcttgccctgtcaccctgggctggagtgcagtggcaggatcttggctcactacagcctcaatctcccaggctcaaatgatcctcctgcctcagctccccagtagctgagactacaggcatgcactaccatgccccgctaatttttgtactttttgtagggatggggttttgtcatgttgcccaggctggtctcatctgccttaactcaagcactccttctgcctcagcctctcaaaatgctgggattaccgttgtgagccatcatgcctggccacatatccttctttatctaaggtcagaagaacctttaatttcaattaaccttccttggtcaaatagtcttttcttcaaccactggccaagctgaaagtagagactaaaaaataccacaccattatttggccagcaaagaaactctccctcccctaccatcaccatttcctctccttttccttttgcctcttccccctttccctccctttctcctccctcccttaccttctcctttcctcctttcttccctgcttgctttggcttaatgaaaggcctcacaggacgctgtccgtggtgctgacttgtttttctgtcttgttcaaactctgtatgcaaatgaaaagacaacacagctattgaatgttgaagctggggacattccccaagctaatctctgtgcctgtggtgtggccacggctctggccattatctctggccacagtgccccggagatgctgatgctgacctggaccagaggtgccagcctgggcactgccagtccccacagccattgactagagccccagggcacaggcagctagcaacttatctgggtgccccagggactgctattggcaaagtgatggccccacagggaccaaatgtgaagctaaagcaggatacgcaggtcggagataaggccaagaacagattccctttagcgctcaagtgctgtttgtcagaaattgacagccccacggccctggccggtgacaggcacagggtgataacaataccatatgatcagcatcattggaggacaggctgtcactggctcccagagataaggaaacaatgggcgacccctctgcctagggaaaggcctgcatggagcccccagggcaaagcagcaagatctaaagtgtgtctctgacccctggcacctcaccagcaccccctcctcccagcaggcccccagagctccttcctgtcacccagggacccgtggcctccattgtgcacccactattctgacccctgttctctggagttaatcatgttatctctagagcacaggtgttagtggatgataacagacaagcagttccctccccagctccctgcaccacagacgctgctaagggaatggagtgggagaacagagctttctcgaggtggtttatgcaggccatggattcagcactaacagcctctctccagcactggattcttgagaaataaaaaggttgggtgtggaggggctcccacattttctagtgtcttcccattccaccccactggagcaaagctgttgaccctacacttggggacatattttgggatgggttccactgccctggcttggctatatcccttcccccactgctgcgcaacctttccctaccatagccccaatagccatgaaatggggactcagcacacctaggtcctagttctttccctgaccccagcttgatgaatgatttagggatcatagtcaagtcacttcactccctggcctcagtttcttcaactgtaagttggggctactcatctgtaactatcagatctgccaggtggtatgaagttccagtgagataaatatatgtgagggctgggcggtgggagatctgagatttaccccccactaaccaggcccactgagtacagtgtggagcactgctgggtctcagcttggaggtctgctctgcctgactccccaggtggcaagatcatccccccgttcccctcctcttctatgcttaggctgtgatttctcatgggctcacctctcataccctcctgttttctttctctcatgtctgtctctcaactggttcttgttcttgcctttttttctgatcttttacgtatatctgcaaacctcactctgcttcctcatttgttgctgatgcagaaagaatgcaaaggattatttatttagcttgtattttggcaccattatggatgactttgatgttgctttggacaaccatccagcaccctggcttcgtagttttttttgaccctgtcaactccaatgacctccacccccttaccccttcagttcgtgcctgcggacacattctagactttgtcatcacccacaacttacccgtctcgaaaatattaaactttctggtgacagctcctgtgttcttcattctctaattccactctgccttctctttagcatcactaagatctctagttctttctgtctccatttcctaccaaaatgcttgccctttgcttggtctgtttcttttctaactggccaagatcccctgactcatgtcaaatatgtccctgcccatgcgtcctttgtccctctgctgccctcatttatttacttcattcattcactcattcattcattcatccaatacatttttagggctggtcaagggaatgggtggtatttatacaatttttttttttgagacagtgttgctctatcacccaggctagagtgcagcaatgcaatcacggctcactgcagcctcgacctcctgggctcaagctatcctcccacctcagcctcctgagtagctgggactataggtatgcaccaccatgtccagctaattaaaaaaaattcttttggtagagacaggatctcactgtgttgcccaggctaatctcaaactcctggcctcaagtgatcctcccacctcagcctcccaaagtgctgggattacaggcatgagccattgtgcccagccccagcacatttttattgtgcatctactatgtgtcaggcacagtgctaggatctagagagcctatggtaagcaaaatagataatagttatccccttgagctctagaattcaatccaattgaattcactcttggctattatatttggggtgctgatggttccctgtgaatttctggtttctaacattctctggaccctcattgttactgtccaatcttttatttttttatttgtttgtttttgttttttgctgtccagtcttttaaatgggtgctacattgggtcagtagttctagacattttagtgtcctgacacatttacaatcccccctttatttttgagacagggtcttgctttgttgtgatcctctcacctcggggcatcccaaagtgctgggattacagacatgagctactgtacctggcctacaaatcttattgaagttataggcctctccccagaagagtgtccttgcatatacattccactgacaattttagaagtccatgtactccataagcccagtcaagagcccataaattagacaaattctgcaaacatattcaactttttggcctaagaattactaatctcatcttgccttcaacccatacaccaacatttttcacatcaggggcacagagggtaaggggcagagttcgggagctcaattgtggaaacagagatatgaatgaagatgaggcaggtcttgttcattctctctaaggtgtataatagcattaaaaaatctttcttccttagtcacttcccaagagtgttgaattggaaaatgtgggtgtattatcttctgctgggcaaaaaaaaaaaacaaaaacaaaagcaaaaaacactcaaaacctagtggcttaaaacaacaataaatatttattacctctcacagtttctataagttgtgagttcaagagtggcttagctgtatggttctgctttgggtctctcataagtttgcagtcaagatgtcagctgtcttctgaaggcctgcctgggactgagggtctgctttgaaggtggcttacttacctggatagcaaattggttctggatgttgtcaaaaggcctcaatccctcctcacatggatttcactctagggcacctgagtgtcctcacaacatggtgactggcttcccccaaagcaagcgatccaagagagagcaaggtagaaactgcaatatcatttatgagatagctttgggagtcacatctcattatttctacaatgtctcataagctttttttttcttcttaagcggcaggatattgctgtgttgcccctactggacagcagtggctccatcatagcttattgtaacctcaagctcctggcctcaagtgatcctcctgcctcagcctcctgagtagctgggactacaggtgcacaccaccatgcctggataattttttctttctttcttttttattgttggtagagatgggggtcttgctatgttgcacaggtgggtcttgaactcctggcctcaagcaatcctcctgcctcagcctcccaaagtgcagggattacaggcgtgagccactgtactcagccatatcctgttgcttacacaggtcagtcctggtcagtgtgaaaggggactacccaaaggcatagataccaggagaggagaatcactggggccatcttggacaccggctacaattatgggagatattcccagtggggaaaccgtgatatttgtgtataagttattcataagttgagactttctcagtcacctctgcctatgcttttgagggcatctattagtcttcaattgttcattttactttgcattccaacacacaaggttagctagcaaagcatatttttcttctgttacaagtgcaggtgtgtaagttatcactacattgggagtaatgaaaacagccatcctttatgtagcagttactaagtgccgggcactctcataagcactttatatatatattaattcatttagccattaaagaaccctatgaggtagaagttatccttgcccccattttacagatgagaaaacggagacacacaaaagcaaagtaacttctgcaatgccccacagctagcaagtgccaaaggagggattgaaccatagcagtctagagagtctgtgctcttaatcaccactcttgaccaccagcagaaggggttgtagatggtgtggaatgtagacgtacccaagttctcctgggggcattcagagagagtcagtgactgagagccagagagtgtcgacatcaagggcagagcatgggaaggagatgagaagaggcaaactaagaggcaggaaaagaagcaggagatgggtgtgtgctggaagtcagatgtgagaggagcaaatgtgggcaagagcgagcggcccaggccacagagtcggtgagcagaatgaggatgacatcggaggtcctggatgaagcagtttggtggagtgacgtgtggcagccaggttaaagtgggttggaagtggatgggaggtgaagtggcaggtggaccactcttgggacagcccagctgtgaatgatgggggaggcatggggtgagtggagggagagagaaagggccccccagccagcaggagatggggatccaggagagatcccagcctgaacccaggcctctcacccaggccaagccgagcagaatctgttcttccgagaaggaagctcccatcacagtaagtgccaaatgaggcctgaagacgcaaatatttgttcggcttctgcccttcttgttcaaatagggcattctctttggggatggaggttggctgctgcagcgaagaagtgagaagtcagtaagggtgggagggtgtaaaggaggagcaagtgctctgggggccactaatgaattccccaggctcctgagccactggaatccattagctcatgaaagcagctaaataataccccggctgctttatgagacatctgttcaaataaagcctacctttctcctcaagatcagacttcatcccactccctggtgcccatcctgctctgtctgactgcggctgaatcaggggttgtatgatactgcctctctgcacccccgctacaagactgtgtgttattgtgtgagggtgtgtggttatgccatgaccgtatattactctggagctatgctctgtgtgggtttctttttgccagtgtataggagtccactcatcgactgaattactctgtgtttgtgtgtgtgtacacatatgtgtttgtgacactgtctcgctgtgcagctgtattatgtggtttgtgactgtgttaccctaaggctacatgtctgggatcttgtgttgctctaagagtttctttctgtgctgtgacaatttttgcctgtgtgttatcgtgatacagcacattactgtatgtaatttggtggtccactgtgagaggccacctctgtgtgtgtgtgttcatgtgcacatgttaccgggggaggtccttgtttttagagctcccaaaatggtggtgggccacttccaagatggtggcaagcctcctgttctctgacctggggttcttggcttcccggattccaaggaatggaatcttgggccatgtggtgagtgttatagctctattagaagccgtgggtcacagaagtgaaccgtggaacccagcgactagcgttcagctcaattaggacgaacccaggcacttagccatgcaggaacaatggcgagcctctagcccgatcaggagctctgttttcactctgctaaatcttgcaactgcacactctttctggtccgtgttggttaaggcttgagctgagctttcgcttgccatccaccactgctgtttgccgccctcgcagacccgccgctgacttccacccctctggatcaggcagggtgtccactgtacttctgtccgctgcacttcacagtcaccttccccagctaggcttaggaattcttagtcggcctaagaaatccagctagtcctgtctctcacacacacactgtaaatttatcagtgacttcgcacgtggctatattacgctgtctggtgtacaaaggtacacgtaaatgatgtgcctgtgtgttactctgcaaattgggtattgtgctacacacagtgaagtcatgggacactgtgttttagtgggacactttgttgtgactgcttgtgtgcacagaaggacctaaatctctgacttcccctcccagtggaccaggaccattctgaggagcacctggacagatgtggcgaatgtgaatgatggtatgtaggatgggcaccacttctcaactgttggataaaggtctaagccttaaatctcagaaaggatcagtccagggcagaggcaacacccaagaggcagccagtccagtagctgggcaaaagaaggagcctaggctgggtgtggtggctcacgcctgtaatcctagcactttgggaggccgaggcgggtagaacaaggtcaggcattcgagatcagcctggccaacatagtgaaaccccatatctactaaaaacacaaaaaattagctgggcgtggttgtgggtgcctgtaatcccagctactcaggaggctgaggcaggagaattgcttgaacctgggagacggaggttgcagtgagccgagatggcgccactgcactccagcctgggtgacagtgtgagactctgtctccaaagaaaaaagaagaagaagaagaagaagaagaagacttcagggaagcaaggtggtcagctggtagcatccaagcccaaggaggcaggtggacaggtgggggcaagggcagaacctgggattccagaacctgcaaatccctgctgtgtccatgatgcaggggggttagactagcaacatccacatgcatcagaagcactggggaattttatctaaatggaccacaaccaaagattctgatttactagggctggagcagggccctggggtctacatttataccaagactcctggctagtcaggggacctcactttaagaaacactggatcccaggctccacaaggaaaaggtgagaaacatgaggcacagtaagaatctagagggggaaaggaagaaaacaagagagaaaaaaaggagaaagggaagaggagatggagaaagtgatgtggcgggcatcgttggtgccctgcccatatctcctgagcactggtcactctagtttgcaccctgagtcctatgggttcttcacttgaggactcttggattctctctctctctccctctctctccgcatccccccactggaatcatctgcaaaatcagctattagcactcacattgttgtctcagtgttggcttttcaggaatcttaagacaggcgagggaagaaatccaaaaactcctcagcctgaagcatccagctgaccagcaggagcaacaacaagggtgtggggtggggctgccaggctgctcctcccattggctgtttgagcttcttccccacttcgggaggttgcagctacttattcaggtgatggctctctcagtagacctgcttcctctctggtcttttggatgcctgatcattttaattgattgtcagaagtctccacttccaaagcattgttcttgaggccacaggctgttgccgccatgcctggcagccagcagttccactcaaaggccccttagccccggccaggggaggtaacagctggcctgggcagaatctgccgaaacccccgcccggcaactccagttctggaggcctctttccagtgccatctggatggaattcctctgctcagactgtgtttggagcaatgtcggcatggtcaggtgttgctgctctttgataaacccagcctgtctcccttgggcagccccaccatctgctttgtctatttcctgcaggaatgtactgcatgaataaagacccctctgtggtgggacccagctgcccgaaggtcagcccctgtgaatagagagcctgggctttgttcaggggtcagtttgatgacagcctctgacaagtgcccagcacttcccagtgtataaagcaccattccagcctttcccccagtgctggaaggtggggattttgggtctgacccatgggtccatggatcttcactacaatagcaaatgaatttcattttgaatggtgacccgatgatgggtagctacccagggccccacagtgaggattctgaagctgtctggacccagaagaaaagattgtgaagtgacttgacgcaatgtcctggagcctggagtggggaacggtagcagactgctgatgccctcagccacctccaagttcttctcaggcctgggtggacagtcccagggcctgctagcagctgcccatcttggatcctcacttcatccttctcagcctgaggtcttcctctggtgccatgagagctagtgcagtccactcacagggcaacctggaagtgccagagattttaacaaccccgcccccagggtgagggcaacctcaacctatgagggatggttggtcagtggctaaaggatccaggttctctgccccttgctgggccaattctgaggcacattctgcaatattgctcagagtctccaatgtgattgagccccagttgcccacagcagtgactcgctcattagtgcaccttgactggctatattccccctcccctgcccggtctccctttcctactccctcaccattctttctgccatcacctcacaaacaaaccacctccactcaagtcctggctttggggggaacccaaactagagcaagagtgatggcaaatgtgtccacctcccaccccatagtgggcagtgacagtatttagtagcattgaccttttgccagcactaggaactaaggttgggaaatggggaaatgaggccaatgggtcgggaccatagcctttgtttttttgttgttgttgcttgtttgtttgagatggagtctcgctctctcacccaggctggagtgcagtggtggggtcttggctcattgaaacctctgcctcctgggtttcagtgattctcctgcctcagcctcccgagtagctggaattacaggcacctgccaccacacccggctaatctttctatttttagtagagatggggtttcaccatattagtcgggctggtctcaaacttttgacctcaagtgatccacccaccttggccccccaaagtgctgggattataggcgtgagccaccatgctgggacagggccatagcctttgaaaggccccatctgctggggctggtggacacccacatcggtagcatcaggaacatactgtgtagtacagagcagggggctgtggagaaggatgcacgtgcctccacatggagaggccaacggaggctttctggaggggatcaagtgggctgagacttactttggatgggaatcagtccttggcctttgtgtccatgaagtgtcagctcttcttccaggagggctgtcatcacctcctacttcctggactggatggctttccccttgcattggctgctacggcacctgaacctctcttttgtggcaccccatggccagggggctatttgctggattatttgaccaaatgtctagctccctgactagattacaagcttcatgtgggcagggactaggcctggttttgttgacttgtcagttcccagcaccaagtgcacctccctcctgtgtcccctctgccattgctctggccccaacttcattgcctgtcatttggataattgtactagtctcctcactggtctccttgcacctaaaagccaccctgaagggactgctgtgtcagccctgctttcccaacccccagcagctatggtcagtccccctcctctgtgcagaggggccaattctgacccagatcaaaaggtctggggaactccgcttccacccacgggaccagaatgtaagaaatgggattatttcaactgcgtgaattgttcccagacaccccagtaagtcctgacaccttcatcacccactgagccacagccttgccccagtagtgtcccagtgtacaagttggggagctgagtcggagctgcctccttttgagtttccttctccttggatttctcctcctccaggaagctgtgttagatgcctccttggctgcaccaagaaggtagtatttgagtaaaaactgaaggggtgagggagtgagccatgtggatgctggaggagagggttctaggcagggggatagtcagtgccaattcctgaagcaggaagagaaccagaatgacaagtagcagcaagctgggtatgaagagaaagataagaaatgaggtcagagtaggggaggcagatcccacaaggcctggtgggccaccctgaaggtctttggccattgctctgaatgagatgggagccactgaaggtctttgagcaggggaggccaggatctgacccatgtcataacagcctcactccagattctgtattgtgtggagattgcaggaggggttggggcaaaagcagggagtccagactggagacattggccagaattcagctaagagatgctggtgttagtaacatgatgggggtgataatgacatgaactgaccaaaatctagatcacagattcatggagtataaaaagctgactttcccaggcccgtcttttcctgggggcagtctccctttggcccgatgccctggcccaccctatatggtgggttgatggcactgtcactcctgcaaaccctgctcctgtcctcactccaccaccctgctgcatgccctggaggagacttctgggacactgagcccctgcccatcaggcccttccagatctgaagtgtctggccctgtagcagcccagctcccaaattctcacccctcctcttctttaaccttagctgcctgacccccttatggacaggagtccctgctcccctctccggcctgccccaggctccagccacatcaaaaggcttgcagttgcagttgcccaaatgcaccaggtctttcccatctctggaccttgctagaatgcccctccttcaccctttttatctaaacaactccttctatttcctcaagactcaacccaagtgtcatcccttccaagaactcttctgaggccccttcaaattgggacatccctttcccctattctcttagccacaacactttctctggggaactatgtctccctcacataactctacacctaagctacctgaagtgagcccacctccatgaacttgctccagtccgtggctccctatgcctgatgtttagaacacaatgcaactttatcttaccttccagctctatcttccacacatgccttctgccttctccagctcctaccacacttgacatcccccactccttcgccatgagttttcccctttcagtggatgagaagtggcccaggatgttcccagtgacacattagcatgtgccctatgcagaggggcaggatggactttcagatgcctgggggatgacaacgaggcacatgcctgggagtgagatgaggctgtagtgctcttgagctcctagtcagacaggcctggggttgaaactcggtggtgacacctactagctatgtgaccttgggcaagccatttcaactctatgagccttggttttctcctttgtttcgttgttgttgttgttttgttttgtttttgttttttgttttgaggcagaatctcactctgtcacccaggctggagtgcagtgccattatctcagctcactgcaacctccgcctcctgggttcaagcgattctcctgcctcagcctccctagtagctgggattacaggcacacaccaccacacccaactaatttttgtatttttagtagagatggggtcttaccatgttggtcaggctggtctcgaactcctgacctcaaatgatccacccacctcagcctcccaaagtgctgggattacaggagtgagccaccacacccggccagttttctcctttgtaaaatggaatatgaatacctgcgtggcaggggtgtcatgagagcccagtgaaataatgaacacaaaacggttagcacgtgactgacatttcatgaaagcatcaccaaattgccataatcattgtcacgaaacagatcaaacagaaaacctctgccatttttctaaccatagcagtgacaggggaatgtactttttgctcagacctgacagtgcctggcttgtcaggataattcaggatcctccaagacccagctctgggtggttcatgactagtcagttgcagtttgacaattttgtattgaggacctgagtcatagaggtccagggctgatgagacggttgttctctgtggcccaagacagggccatgggagaccttggccttagggttgcagaggaaaagcctccaacttcagcctttctctcaggtgtcctcatcagaacaattctcagtggcagaattttcaggacatcagccttgtccaaaatgcaagttccaaggtgatggaggatgtgagtccagacatccctcaaccagcaatggcagagcagatgggtgttccacacaggcaagggggctcaactgaagacctctggggccagatatatcccattgtcccctttgagctccctgccagttctgctcaggaccactccaggtcttaagtacgtagcagcttcttggggtcctttaattcccctctcaagtccaggccaatcttccaacttttggtgcaggaaggactctgtaagctctggtttcgattgggtaaatttacacctgtatcctatgggtccttgtaagtctctagtttgagattccatatttgcttccaataccagaggtgtcaattaaccctgagcattcatctccaacccagaaggactgaagacagcatgaccagtccatggcattctgtcctcctgtgtccaggggagacgtcactaagtaatcatgatattccctcccactaaggatacactcatcatcagaatccagggctcctgcgagccactgccaaatgattgggaaccctatttgcatttgagcaaatgttttggggcccagatgatagcaatggtgttggtaatggtggtgacagtaatgatggtgacagtgatgatgatcctatttgcagatgaactttgtggtttgaggcttgcaaagtcctgtcagctatatggctccacaactcattcctacaactgtcaaagacaggtaattgtattattcagtattcaggcctctttaggttttaagtaacagagtattttttatctcaatcatgtctacacctgggtcacctctcagggtggggtgggggagggggcagatgattctccaaaataatggattctaggggtacaaaaagcacaaatccacaagagtataattgcccccacctcaccattttatagaagagaaaagtggttgttcagagatgccaggtgccctgcccaaagtcacacagccagtgagtggaaaagccaggactaatacccagggttctgaagctttgagttcaggatgcttttctcatccctagcactgcttctcagaggctaaagcaaagttaccctcgctacctccaagacagcccccacagcagagcattctgagggcgtctttagtaacactggtgaggacctcgatgtggacagatggggcttctactgctgccagttccgtcccaaactggcctgggtacagattcagaggggacagtgggggcagggcaagcagggactctcctctcccagtcatcagccggcccaggcccaggcgcaagctgtcctgcgtcctcccagctaggcaacagcaggagtccaaacaggcaattaattactgcctggctgctgccggctctcctcctcccttgctcagccaagtgtgtaatgaaatggaaccaaaacagactcccctgcccagagggaccctggcatgcccaacagaggatgagctccagggaagcagggaaggggcctgagacgcagaggtgagtttattaacacaatgagcttccctgaacccttctccctcacctttccctgcctgttggctgcaaaagcagtctttacagacagcactgtgatcccaagtgatccctccctggcagcctgagtatagtggtattgttggtattaatcttataatattaataacagtgaagtaggcagtgtcctacatactgtacaggcattacctctttcttttttttttttttgaaatggagtcttgctctgttgcccaggctggagtgcagtggtgcgatctcggctcactgcaacctccgcctcccaggttcaagcaattttcctgcctcagcctcctgtgtagctgggattataggcgcacaccaccatacctggctaatttttgtatttttagtacacatggggtttcaccatattggccaagctggtcttgaactcctgaccttgtgatccgcccaccttggcctttcaaagtgctgagattacaggcatgagccaccacgcccggccggcattatctcttcaaatcctcaaatcaggctttgatgtactttttatgcctatgttaccaatgagaaaggcggagacacagagaggtggaatgggccctaagggggtgatgtaatgtagtggtcagagcacaggctctggaaccagatagaaccatttaggtcacttactagccatttggcctaggcaagttacttaacttccctgtgactcagtttcctcctctgcaaagtggtgctgacggttgtatctaccttgtaaggtcactaggacagtgtttgacgtgaagcccgatccatggtagctctgtggcttcagagggtaggtgctgttatccttgttctactattttacattaaaatagtaaatgattcagtgcataaagtacaccctatgcacatgacaaacatcacaagtgactaagaaacttttcatccacaaaatttcaggcccattctgaatcctctcactctggcttctgcatgccttgccaggtagcaagttcagctgggcatcatcttctgttctttgtattaaggacgtaatgggagtttttgtttgttcctggaagagccatggacattctgatggtgaatattcttttataaaacttagacacacttccctgcaagagatccttaggtgttccccaacctagttccaaaaatcactgcccctagggccgggcggggtggctcacccctgtaatcccagcactttgggaggctgaggcgggtgagaaaccaggagtttgagaccagcctggccaacatggggaaatcctgcctctactaaaaatacaaaaattagccggatgtggtggtaggcacctgtaatcccagctactcgggagactgaagcaagagaattgcttgaacctgggaggcagaggttgcagtgagctgagatcgtgccactgcactccagcctgggtgacagagtaagactctgtctctaaatataaaataaaataaaatagaatagaatagaatagaatagaatagaatagaatagaatagaatagaatagaatagaatagaatagaataaaataaataaaataaaaaaaatcactgccccagactgggggaaattgatcctccctagacatccagatgggcaggctggccagtgtggggccaaaaggaagaaaaaaaatccaactgagactaacggcatcgaaaaggcaaggtacagacctaaaatgagtcaggaactgccccctcactcattcatgccccctgtctccccacagcctctgagccctggggaaggggtagctgggttaatttatttctgtagcaccagcacctggcaaagggcccagcacaaagcaggagattggtgaatgctgaataaaggaaccagcaaatgaatgaatgaatggcatagctatttggggaaagatatagagtataaagctatagagaaaagaagaaaggagaaatacagtgctgtccattctcagctccttacaagtgctgaataatctctacattctgctgtgaaagatctagaaagacatattgctaagtgaaaaaaagagctaagtatacaacagggtgtggaatcctttatctttgtgttaaaaaacagaacaataagaatatacatgtgtatttgcttatatattaatagttgtacttgtggtataggcagataagaggcaacttaagaaaccagtcactggcctgtaatcccagcactttgggaggctgagatgggtggaccacctgaggtcaggagttcaagaccagcctggccaacatgatgaaaccccatctctactaaaaatacaaaaaattagccaggcatggtggaatgcagctgtaatctcagctactcaggaggctgaggcaggagaatccttgaacccaggagacagaggttgcagtgagccaagatcatgcactgcactccagcctgggtgacaagagcgaaactccgtctcaacaataacaacaacaacaacaaaaaccagtcactgtgttagggacagtcagaacatggggggatgggaaagaggagttacagggagacttcaccctatatgccctttatatattttgtaaatttctaaatcatgtgaagttaaaaaataaatcaagaaaaggaaaacaaaaaaatagaaaatttctgctccaagaaaatgttgagtaagatctacctggcttaatggctgaggagggaagggagcgtgcagtgaatacctagttacagcccatcttctcaaggagtcagtataattaagggcttggagttctccaacctattgatcttggaccagaaaacattagatgaattcccaggggcctcgagctttccgaagttgtttctctaaattccacatctctcttgttgatagccggtagcctctgaacgctcccacgatggctgaggggtacagttggtgtgggctattgggactagagacgttaggaaagacctcatagaggggctggagactaccctggggtggaaggggaagagaagcctaaaggcctggatacaaaaggcaaaggaggcaacaaaaacaacaacaacaaacaaacaaaaaaaaaaagaaagaaagaaaagaaaaagcaatattgtccctgctttctccttgtcatctctccctaagacccacctcctgagaaacatcacaatatccaatatcttgtagagagacttctataagccatgacattggggaaggcgtaatcactctgacatcaggattacatttgtaattgacaaatgtgggctgggtgcggtggctcacgcctgtaatcccagcactttgggaggccaaggctggcggatcacttgaggtcaagagttcgagaccagcctggccaacatggtaaaaccccgtctctagtaaaaaactacaaaaaaaaaaaaaaaaaaaaaaaaaaaaaattagctgggcgtagtggtgcatgcctataatcccagctacttgggaggctgaggcaggagaatcacttgaacctgggaagtggaggttgcagtgagcccacataatgccactgcactccagcctgggtgacagagcaagactccatctcaaaaataaataaataaagacagacaaatgcggaaatagcacagatgctttcagggagcagtggacgctgagagccccagcacaatgggctgggaggaccggggtagggggaagtctacagaactgcacctagggtcagagttgattctggagccaaaggaaggagccagcagctggatgtggctggcccaactctgaggggcttgggtgctgtccaggcacaagaatatctccttgtctttgggatctagactcagagatcccacagtaggaggcctgtgtcctgtagagggacatcctctataggaagtctttgatgagcacattcatttggcttttacacctgaaaggcctcctaaccttttgatgaccttcgtgttgatagacaaagcagcccaggctgtgagtccccaagaagaaaaccccagccctggtctgcagctgcaaggatcaagggcagagggaggtctccagcaggctgtacaaagctcaaataattttgagcactgccctggagcctggtgacaggctggtccaggccatggcctcctgtgccatcaaatgcccttttcttaacaaggtttcctcatgctaggaacagacacttttctttggcctgacctctctcaggggctcctgccttgcgtacccacctgtgagtaccaccatccttttaggctgaatatggtcaatgttgataataataagtataccaacagcaataacaatgttatcaaaattgccatttactgtgtttactaaaaggcataggactttacccacattatctcatttaatcctcacaacaaccctatgaggaatgtactattattgacccattttatagactgagaaaagggcacagagaggtaaaataacttctcctgggtctcacagccagcagaggtagtgctgggattcaaatcaaagcagtctgaccctaggatgggttccattaatggcgatgtgacaccaagctcttgttggctttcttccccagtcggcctttcctcccaaactccctgcatcagatgtggcttctctgggatccctgtcattggctgtggaacctcagaatcacctctgatacgtagtttggctttggtgacagacagatatgggtttgagtcttgactctggctcttgttgctgtgtggcctggaggaaggtgatcctgctctctgtttcttggtctccaggtgtgtgaaatgatctggcaatatctggtgggcttctgtcattgtctgtccagtgcctgtgcttactctgagaactctcttctcatccccatccacagggccatcattgggttgccacagtcttatatgacattgacactgacattgactctgactataagactgtggcaacccagcaattgcatggttttttgtttttgttcttgagatggagtctcactctattgcccaggctggagcacagtggcgcaatctcagctcactgcaacctccatcccctaggttcaagcaattctcctgcctcagcctcctgagtagctgggattacaggcatgtgccagcatacccagctaattttttgtgtttttagtagagatggggtttcaccatattggccaggctggtctcgaactcctgacctcaggtgatccacccaccttagcctcccaaggtgctgggattacaggtgtgagccaccacgcccagccaatgattccatatttattggagttggtcggtgggtgggggtgcggtgcttgatttgagctggccacagtccttccccaggacttttcaagccaagcttatgacaaacagctagttccactccagcagtaataactatgagatgggaagcttggaagcggttagcatcatgtttacttcaatatggaagaagttcacagcagaagaaaagatgacatgctgagagcacagaaatgagaagagaggggtctctggtcctggctgtcctgaggccatgctcctgaggtctgcccctcccataattacctgagaccacagcattcttccagtaatgccctgttgaacctaagctgaggttgagaatacatgaggggcacttagcacattagatggaaaaagtaagccctcaataagtggtaactattatgactatttttttttttgaggcagtgtctctctgttgcccaggctagagtgcagtggtgctatctcagctcactgcagcctccacctcccgggttcaagcgattctcctgtctcagcctcccacgtagctaggactacaggcgcccgccaccatgcctgactaattttgtattttcagtagagacagggtttcgccatgttggccaggctggtctcaagctcctgacctcaggtgatccacccgcctcggcctcccaaagtgctgggattacaggcatgagccaccgtgcctggcctatgatgactattattaagacagcacaagcctgggcaacatggcgagacacccacctccacaaaaaatgttttaaaaattagccaggtgtggggcggacgcctgtggtctcagctatttgagaggttgaggtgagaggatcgcttgagcccgggaggttgaagctgcagtgattgtgattgtgccactgcactccagcctaggtgacagagcgagaccctgtctcaaaagaacagaagagcacagactcagctcaaattcacacctttagaggcagtcgatggaaggagagaaggttaaattctattttctgtatacaccactgtgagctgtggggagtccaggaagcctcctcgggaggagcttgagaggagggtggaagacatcttggcaggggctggaatgaggagacaggtcttgctgaagcaaagagctggacagtttgaggactcagccccgcctcccctggtcaaggcccttagaggcatctctatctgttccttgctgtcagcacagtggtttgtccacaggcctgtggacagcctcctttatagaagcctcttgctgagcaccaggatagaaggatgagaaagacgtcagccatacccgcatggatgtgcaacatgccagggcaaagcacagagggtggcaggaagacttaggaggggcatacccaaaacttggggaatcgaagagggctttctggagggaatgacatctaagcagtgacctaggaatgaatgatgatactagctaatatccatgaaggacagattgcatgtgaggtgttttagatgtattatcaccttgaatgtaatactctccgccaccttgagagggaggactgattatgcccactgagcagattaggtaactgaggctctgctaggtgaagtgtttcctggtcacacagctacaaagcggtggagcttagatttgagttcagctctgtctactataaagtgtgttctggggccgggcgtggtggctcgtgcctgtaatcccagcactttgggaggccgaggcgggcagatcacgaggtcaggatatcgagaccatcctggctaacatggtgaaaccccgtctctactaaaaatacaaaaaaattagccgggtgtggtggcgggcgcctgtagtcccagctacttgggaggctgagacaggagaatggcgtgaaccaggaagcagtgagctgagatcatgccactgcactccagcctgggtgacagagcaagactccgtctcaaaataaataaataaataaataaataaataaataaataaataaataaagtgtgttctgaaccacagaaatgagagtaaatgagagtcagggtgggaagcagatcaacccctgcagctggaactaaggagatctagttgagttgctggataggaggctactgaagcaggcaggggctgggacacatgaggccttgcaggctgagggtggggggagtttgtgcttcatcttgggagcagctggatgacggaaaaggccagggctggctctagaactctacaaggtaagcatcctgcccacagatgcagactgaaatgctagtgcatgagcctgtggcccatccgccctgggtgacaggctgcctcctgtgtctcacctgcctgttgcagcccccctcttgtccaggcactggagagaaggagcccaaggactcaggccctcttcatctggagcgaggagcaagctgaggattctcagccaatcaccaagctgtccctaaatgagccataatcacccctgattgctcctttgtcaggccggctctcagagccacttccatctgaggctgtggggaggggcccttcagaccaacgtgcactgctggtttcctattttagaataaacatgtggggggcggggggctgggcacctcctgagctctcagagatccaaaaggcaggcacagatgaatgtgggggtgaacagaaccagtccccacagtgggcaggagtttacagctggtgagccacttctctggcccttggggccagatcatatccctatttgatgaatgaataacaggctcagagagggattagtgtattcgatcacagagtgcagacaatggagccaaaggacctttcattcattcattcactcgccaaatatgtattgagcacctgctatgtgtcaggcactgtgctgggtgttcaatataaacccagaccttttccgatcatgacaacaataacaatagccagaggttattgagcacttactaagtgccaggtgcttcactacctacattccatgtgatgtctcgtcagtcctcccaccagcactgtgaagtggagtgatgcaggcatgccaatggggcaggaagggtttctctctgtctccatcccaaaggttggcatatgccaaaggtgactcacaaacagtggcatttgaaggagacaggaactgaagagctgaggggatgagagaaggggtccaaagaggaggggtggcttcaaggtggtgaccacatggtgactgcaggggatcagatcaaagaactcacgctgcagagggcaggaagcccagggagctgattaggtacagccacagattgcactgtattgagagatcctgcttaacgcgagtaaaaccctcctctatgccttcctttgaatgctgtgtgcagctcccagctctgaccagtttaacaatgaatgacccatcccttcttccccccgctggggcacagttctagggtgatcatttttatccccatttaatagatgagtaaactgaagcagagaggccgtgagtcacctgccaagggtcactcaaccagcaatggcagagttgattccagagctgaaccctgaagcaacgtccgcctcaggctggtcctagacccagtggtcatgagtctagcctggggacccctcggtacttggcaggcagtggataaaacaacctcagcccctcactaagaaacagcaagcccctccccctcctgcatctcaccctccccacggcccagctcctctcagagctattaaccaggtcacgctggcttgtcccagtccaatagttcccttaattgcctttttatagcacgtcgtacaactgttcattacgctgtcatatttcccctcgaaggcagcagtgggggagccaaactgaggacggggacccatccaggtggcaggggctgtgtgtggggcaccaatgtgtgaagcttattttctacttggtcagaatgaattaaatgcatgcttctcacccttgagtaatacaggaaccacgtttaaaggggaaaaaagtcacagccccctgtcaacaattgacaaattatctttattacaattttatgaaaatatgtacagacagaaagctagctctacacaattggaaaagcggagacaatataccattgcaacaaaaacaaagcctcaatatcagacatttcaaaagaacacgaataatttaacgtgatggatagtgtgtaggtgaaatgaaatcgcacttgcacagtgaatatggttcagcatttagcccccctctgttcttttgtcataaggcccataacaattaaagcagtatttggtcatccaggagacctagaatccgctggtaggttttttagatataaaataatataatataaaattggccaggcgcggtggctcacgcctgtaatcccagcactttgggaggctgaggcgggtggatcactgcaggtcaggagtttgagaccagcctggccaatatggtgaaactcctctctactaaaaatacaaaaattagctgagtgtggcagtgggtgcctgcaatcccagctactcaggaggctgaggcaggagaatcacttgaagccaggaagtggaggttacagtgagccgagatcgcaccactgcactccagcctgggcaacagagtgactccgtctcaaaataaataaataaataaatataaaataatataatataaaattaaccaattctgagagagagctctcacagcctaggttgagaaacaataaatgtgtcccgggagcctcttttttgagatgtagtcttgctctgttgcccaggctggagtgcagtgatgcaatctcggctcactgcaaagtccacctcccgggttcaagtgattcttatgcctcagcctcctgagtagctgggactataggcacacaccaccaatttttgtatttttagtagagacgggctttcgccacgttggccaggctggtctcaaactcctaacctcaggtgatctgcctgccttggcctcccaaagtgctggaattataggtgtgacccactgcaccagaccaagcctttatcagctgtgcaggtctaagacatcctatggggaagagccatgtgttcttggggctggaaagccaggatacagggcccagaccactgaggccagatctcacccagactttaatgaaatccacaaggtcttccgagagcacctactatgtacctggccctatgcctcccacctccctgtcccaggagttgcctcagtagtcaagagggagacaggggtgcctcagaatagatgtatataccagtcagtgcagggagcattcttgggaactgacacaaagaggtgtttggccacggggagtcagatctggattgcagtgcttctctggagcccagagacccaagccctgccctgcagactcacctagagtgctgaggttataaggacagctctgatcctgggttcgactcctgaatccgccactacctagctgtgagaccatgggcaagtcacttaacctctttacattccagggtcctcacctataaactaaacataaaaccaacccatgctcatggagatagtgagaggcttgtccatgatgttgtgacacagggaaaggaagcacttagcttagaacctagcagagaataagcatttggtaaatgttagtgttgatatctttcccgattccagctctcaacagaatttgaagagaacaaaaatgtctagattgggcttttaggctggaggccatggactcaccatgggtgggcttagggatatgaaaccttgtgcaatattgtgtgtgtgtttctagaagaaggatctgcagcctcaccagatgtccacgggggctgtgacctagaaaaatctttggtcgctgagctaggtcagggctggcagaaccactcagtcttagctcaggctgccatgataaagtgacaaagcctgagtggcttcagcaacagaaacacatcttctaacagttctggaggctggaagtcccagatcatggtccagcaggattggtttctggggagggcttgcttcctagcttgtagacagctgccttctccttgtgtcctcatgtggcagagagagagagagaatgagagtgaaagagagacacagagagagagagagtgaagagagagagaaatcaagagagaggacactctagtgtctcttcttataaggacactgatcctatcagattggcatcccaccatttttacctcatttaactttaatcacttctatagaggcatctccaaatacagtcacattgagggggagggcttcaacatatggatttgggggtcataattcagtccatagcagtcagtgagatagattattctagatctcggtggaggcaggttttgaccagcaaaggctgacccttgaggcttctaactaaagcaaggaccacctgcagctcccctggccccagtgatcatcactcctcccaaccgtcctcttccctgcttatgcccatccaattatccacttctccaagtccattcctgcaggccctgcctgcagcctcctaagatgacagtgggctagtctcaggattgtgagaatttaaggaaacaatcctgagagtgtactttcagcagtgcctggcacacagagagcactcagtaaaggcgagctctgcacctagagagtgtaggaggtcagacacacagcccgtttgcactgctggagcccaggatccctgtcccagggtttgctggaatcagagcccccaacacagctgtctctcccagttataaccagtgacccacagattcctagagacctagaatctgctggtagtttctgagtgttcttgcaaggaatccctgaatctggatgtgcatcccaaggcttagattaacaaaaatcacatctcacacacctatgtaggactgactttcaattacataaaagatgatgtgagcacaaaagacaaatccattcagaagagctacagtattcataattcagacctggattttggctgttgtgtgtttcttcagaggggggaaatggctttgtaacattgacttaattcatctccatgaatgagcatctaatgtgtgctgggaacacagtggggaatacggctgacatgcccctgcttcccagcataactgaagctgtgttctcaggaaagggcaggaaccattggtctaacccaccaagtcaggtccagggcccctccttcagttctaggtagcttctggttttaaaggctgctgagggcaagacctgggtcctcatgtctcccgctctctgaccccttctcagagctgtcagcccagaaagcatgaaccttgaaccccagaagtcatgaaatgcagcctcccataccctgaggcaggacttctctagaccttgtctctgataggacatccagcctctgcctggacacctctggagatgggatgctcattatgtgtgcaaggaaaactgctactacatacacagtcatgaatgtattttaatatgtcttaccctgagctcacaggggcagcacctacatggtcaatggccccacctgatttgtcccattgaagggagaagaatcagggtctttgttccatgcataggctcccacctggctcctcagccttgctgcgcctctcctcccttgtgcccagggacacagcatcaggaaattgggttttgatttggggaaaggtgaacatggctccctccagctataggaaaacctcaccaatgtcccagccccaggatacttgggggtgggagtggtttatgaagccagtgcctgtcccctcagcaggaaaagacttgcaaggctgactttgctctggaaaaggagggctctgagctacaggggagggggagggggctatctgtgatcattcagccccgaaatgatgctcatgatgttggctttccaggccattaattcaagggctccatgcctccccttcccccatggtgctgtctgctctgggagataagcccagttctatttaaccctatttattcccccaaagtgactcccatctctgttagccaggcatttaaccccctgggtactgaaggcatcaaaggcagagagattgagctcatgtgtcaggaaggggtgcgtgcatttcacctgggccctggcttcagggaatccgatccaggtccttcctaatccaaactcctcatctggaagtccttgcttcacaaggcttggtggaagtcctgagagaaggtaggaacctgtgtggccctggcaggagagaccctctgacacccccaggttgggtagcgacagctcctgctctctccccacataccctcccagtccctagtttcttagtcacaagatctgggttctggcatcagcaaaagagaaaggctgtggcatctctgcctcttttgtgtcccactggctggtggctgcattcagcaagccctcttccatctccatctccctgcttggtcctttttacgtcccctgcccctttctgccctttgttctctcctcttttccccttcagtgatcacacaagagtagtcctgactactcgtctcggtgtgtgtgtgtgtgtgtgtgtgtgtgtgtgtgtgatttcttgtgtctgggggcttgtcagtgtgtgtgtgtgtttacctgttcttgcactgctgtgtgtctgagcctgttatccaggtgcctctgcccatgcagagggacccaccagtgtctgtcctgatttctttgtgtggcaggcagtcttagtacaaatcttgcatgtgtctgtctgtgtgctggcctgttcatgacctgtgtgttgctctgtcaatgtattagaatgctctgttcaatctactagaatctctatgttgtcctcatgtttttgtacatctatccatcggcttgtcatgctctgtgtgaatgtatgtgtgtgttgtgcttcaactcaggggaccagtctactgcaaaatcctctcctagggaacccttccagaggagctatttgggagaatttggaggttgatggcttcgccagggcagagcccagctcactaccagcaagggaagtcatcctgttggtctcctgggctcttccctctccctgctcctgacctccctccccttctctccaggtcagcttgcgactgtgaggagcagggacagagagcttcaaagacagaagagcgtacattccaactcactcaacccccagatccaatcgcaggctttttcttgtgcactcccatttccacccccagccccacaacgagaactggctgttgagtatagtcactacaacaatcacaaaataattgctatcacgtattgggcatgcagcacctgttaagcatttcatatatgagatctcattgaattttctcaataattctatgaggccgttattcttattttcacattttagagatgaggaaatggaagctaggagaagtcaaggaagtagtcaatgtcatagaattagtatgtgatggggtagaattattcaataaagtgtgggttgtttgagagtttgccacacctgccttcagcctgggaagaggcatttattacaaacagcaggaaaggagggaaatatgggaattcctttcccaactgctggcatctaattatagccagcgggactagaatctgattttgaatttcatctctttggacaatgaggtggccaaataccaaacgacaaccagggagaaatgatgtaaggacaagacgaggtagtgcagggcaaggcatgctggaaagagccttaggattcctgggggttctagcctggctttaacctggattctgtgtgaccttgggcaggacacttccttgctcaggcctgagttttcttgtctgtaaaactaggataaatgtgaggttctgttgggatgtttgggggaggtttaaacattgcagaaaggaaaattggactcagggctttctaagttccctcctagacccaagaattggagtggggagtataggaagagactatgcttgtgtcatcttgacaattcctggaatagccagaacagaatcacgtgcacaggaagggctgtgaaaaggttcactgaatgaaggaataaatgaccccatctctcactgatgaaaaaacgtcacagcccactttagactcacttgtcagagaaggcatcagtggccatcctaaggtctgggtgtaatgctgtggaggaggcactggggaatcctacaaagacccagcctctgcccagatcatctcctgtgggccaaagaatttcaccagaaacagaaggggagaggatggcaattaggatgtggagatctttgtctataggaatctgtagggaaaattctctctctctgtctttcctgtatctgagaattggggtgggccgaggctctccgtatagggcaaatttcggatgggggatcgcttctatttagaagcctccttggaggagaggatctctgtgtttggaggaagaatctctttcctgtctttgttctgggtcctgtcatgacttggagtgtctgtatttggaggacggttctatagaggggtctttttttgttttgttttttgttttgctttgttttgttttgttttttggtcttagtagctggaggctaagaagaggatttctgtcttggtttccaccaggcaggagctaggggctttccagagcttctggggaaattaagggggtacctggggagaggttaggagcatctctgtccaatgtggtggaggttccctatctggagagaagcctcctccgggagactgggaggggcttgggatgggaggaggtggcaggaggcgggagggtgtagagagggaagcctgtcttgtcctggcagctccaactctctggccaaagccctcgggccgccctacttgtgcgctgacgtgagctaatctagaaatactgcagagaaagagtggctggggttcccagggagaaagggcctcgagagaggggagatggggagctgcttccttttttgtttccttcggtttttccgtccgcccccgcccccacttccagtcacagccgctacttctccattcaggctgggactgccaggtggagccctgcggtttactgctcaggaggagcccggccaggacatcagctggggacttacgcagggacccattcagagcagcggaccctcacggagactactacaaagggactaacacaggcacgaacgcaggcaaccccattcgggaacacatacgtaatccaacacactagctctggcacacacactggaatgcgcgcaaaaccacacagacacagaacacacgcggttaccaaacctcattctcagaggccacactgatccaacctcaagcagagtctgatacagcatcggtctttgtctctgggtctctcccttactcgcgctcacacacccgtaccccaatcaacacaaacagcccaagctttcacagcctggaggcggccgtcggagcagggccccagcgcaccgcgagcctctgcttcctccgccttgcagcgccgcgagcccttctttcctccgcgcctggccccgtctgcgcccctctcggcgtgggcattcgcagacccgctaggaggctgacgagaggtgtcctcatagagtcctgccttcttccagacccccaaacgaaaagaaagagaaaagccaacctttcgcctccattctgcacgcatttggagagcggctggtggcgagcgatccgcacaatcgcttccctcgcggcgtccctggacgggcggagagaacccgggtgactgagcctgaggctgagcttccttgggagcgatccatgccagccacttctaccttcaagggggactcgcggccgggtttacgcgcgaaggatgggtgccagggaaactgacttatagacgacccgctccgcgagagactgacaactcagtcctgcgggctttcggggcgcccagaccagtccttagccagaggatctggggctgcacagctcccggaccctggagggggtggtccgggggtgggagactgcgagcatcagcccacgccggccccctcccaccctgcggcggcgaggtgggaagggccaggatgcgagcttagcacctcccctagaaatgcagcacttcgcccccccacctcccctgccctcggcgctccctctttcacgcgctccctcccgcctccttcccaagggcgcccttcttctgcccccagctcacgtctgaatccctcggcgccccctttctcttctcctagccccttcctcacgtcccctgcctccgggtatttcctctctccaatcccccacccccgcaccgcctgattccgaggggcgggagcgcattgggctgcgcacgggtgggggcgccgcgccagcttcgcgtagctgctctgacgccgctgccgccgccgccgccgccgccgccctccgcagcccagctcgcgccccgcggcagctccgcagtgcactagccaccaccgccgccgccgccgctccgccagacctgctgccagcttgcccggtccagccctgagagagcctcgaacgccagctgcgagggtcatgagccagagagccccggggcgccgcgcggagagcaagcggagatagcgactttgcgccccccagccctcgccttcttgcatcgcgttccccgcatcctcgggtccttctgtcctttccgctgtccccaccgccgccatggccaccttgctccgcagcaagctgtccaacgtggccacgtccgtgtccaacaagtcccaggccaagatgagcggcatgttcgccaggatgggttttcaggcggccacggatgaggaggcggtgggcttcgcgcattgcgacgacctcgactttgagcaccgccagggcctgcagatggacatcctgaaagccgagggagagccctgcggggacgagggcgctgaagcgcccgtcgagggagacatccattatcagcgaggcagcggagctcctctgccgccctccggctccaaggaccaggtgggaggtggtggcgaattcgggggccacgacaagcccaaaatcacggcgtgggaggcaggctggaacgtgaccaacgccatccaggtaagcgcgggattcccagttctgcctgtcctcccccctcccagctcagcgtgccgggctctgcccccgacagtcgcccggtgatctcggcctggagaccccctcctgtacccaggaatctccctttctccatccctcccagccctgcgcggggacctacgcccccaggcggtgttttccgccctaacccacgctccctcccaacggcaccagctgcaagaccgctaggctgaagttcggtctgagacacctgtccggagacactgcaaaagtgaaggaaatggggggagggagcaggaagcgatgagaaagaaagaaaatcaggattggagggcacggtttggtcttggactctggaacggattcacagctgcatttttgggaggaaagaagaaggggaaatcgctgaggtcggagtctcctccccccgcacacacgcatagacacgcacacgtatataggcaggcacaccacatgcccacagccccccttcccacgaacaaaggcgcaggcacaggcgcacacgacatgtatctatatatagaccacagtactatccccaaatgcacctgcgtacacccctacagctccacaaacaaaagcatatacctgcacataccaaacacacgaatattcgtttgaacatatgcacacacacatgcacagatgcatgcagacaggaaccagcctgctcccttgggtgcggccctgttggagacatacaggtatacacacacgaaagcacacacatgctcccacacaaacacatttagtccgcaataatccagcattacctgtgcacagactcgcccctctcgcccgaaatcccggctgcaccgcaaagaggcggccagctcctccccgtgtgaccctggcgaagccctctccagaggctaagaatggcccctgctctctaggccctctccccttattcctaaccccccactccccaccaggcggcgcaggactcctacatagggagcaggtttggagtcttggcaacgacctccgagctagcaggggctggcaggccgcagctttctgggccgaaggagacttcagctctaggcaaccccggtcccttacagcttggccccgcggcgtccctggagcgcactatcactggggccacggaaggcaggttttctgggagcagaggcctcccaggggttgttccatgtatcggggtaagcaggactccaccgggccccgaacaccagatggcccgacccaaggcgctttccgctccggggcccggcgagacggccttgctggatcacggacccggggctgctcccgccttcgctgtgccccgcgacttcccggggcgtctttcaaggctccgtttgataggccccaagggaggccagggcaggaggctggaggctcgtaggcctccgggaccctggatttcgttagctcttagtccccgtgtggattctaaaccctacagccctgtccgcctgaccctgaagcttctggttctagactcttgctcggttcggctttctggcctccctggcgccttcccgccaagctcctcctcctgcttgcctccccagcctccacttagtccccttccttaggtctcgccctcgcctcactctaactccagccttgtcctaagactctcaatttccagccctgcttcctcctccccgcgcgctgctccccaagcgtcttcacattgtctctgttcttgcctcccaggggctttgccccaccttcagcccctctccctctctaccctatttccttttcgcctcacaactgcagcctttaacgtttcctcctctggtctgagcctgagacgcccgagttttcctctttagctcccgtgccccattccagccccaccacaaatcccgtgcccactctttccactggcccaggcccagctcactacctttcttagagcccctttccgactacgctcccttctgtcccttctcatctcctcccccaactcctcattctgttcctgtccccagaaaccatcccgaagtatctcccttccctcctgtggcttctccctattctcagccctctcccaccctagccctctcgctatcaccagccattagcgcacctttccttctcagatccgtccatacatccctccctctccatctctggctcgacacccgggctcactattagttcccctacatccaccccgcagcctgctcttaacctctcctccccggcggctcagacccaattctcagtgtccttagcgcccccttcgggccacagcgttaagccacgccccccgggcccctcatccgttgccaagttcgctgagcgtccgcgtctggttgcctctccgccccacagggcatgttcgtgctgggcctaccctacgccatcctgcacggcggctacctggggttgtttctcatcatcttcgccgccgttgtgtgctgctacaccggcaagatcctcatcgcgtgcctgtacgaggagaatgaagacggcgaggtggtgcgcgtgcgggactcgtacgtggccatagccaacgcctgctgcgccccgcgcttcccaacgctgggcggccgagtggtgaacgtagcgcagatcatcgagctggtgatgacgtgcatcctgtacgtggtggtgagtggcaacctcatgtacaacagcttcccggggctgcccgtgtcgcagaagtcctggtccattatcgccacggccgtgctgctgccttgcgccttccttaagaacctcaaggccgtgtccaagttcagtctgctgtgcactctggcccacttcgtcatcaatatcctggtcatagcctactgtctatcgcgggcgcgcgactgggcctgggagaaggtcaagttctacatcgacgtcaagaagttccccatctccattggcatcatcgtgttcagctacacgtctcagatcttcctgccttcgctggagggcaatatgcagcagcccagcgagttccactgcatgatgaactggacgcacatcgcagcctgcgtgctcaagggcctcttcgcgctcgtcgcctacctcacctgggccgacgagaccaaggaggtcatcacggataacctgcccggctccatccgcgccgtggtcaacatctttctggtggccaaggcgctgttgtcctatcctctgccattctttgccgctgtcgaggtgctggagaagtcgctcttccaggaaggcagccgcgcctttttcccggcctgctacagcggcgacgggcgcctgaagtcctgggggctgacgctgcgctgcgcgctcgtcgtcttcacgctgctcatggccatttatgtgccgcacttcgcgctgctcatgggcctcaccggcagcctcacgggcgccggcctctgtttcttgctgcccagcctctttcacctgcgcctgctctggcgcaagctgctgtggcaccaagtcttcttcgacgtcgccatcttcgtcatcggcggcatctgcagcgtgtccggcttcgtgcactccctcgagggcctcatcgaagcctaccgaaccaacgcggaggactagggcgcaagggcgagcccccgccgcgcttctgcgctctctcccttctcccctcaccccgcccccaccagcccagtgcgccctgccgccgcgcttgggaggccaagctttaaacatctctggttcctagtttctgattattcggggatgggggggatgggaggggacagggattcacgatccatcgcgtctgcgtttctgttgtcctttcttttccacaacaccctggttttggggggaggcggggtgcatttgcgggcagggttctctgtccttccaagtggggccccgacactttggttccagtcatcgagggggttgggaagggagggagagggggcgcagctcgcaggcgtggcaacttgaccttgggggaatatttcacatccatccagagctcggaatctacagcgtccagccatttccagcaagagcgcttcccattccggagacgtttcaaccctgcagcgggaaaggctgactgggaaatccattttgggtgggcaatttccttcaacgaagccggaaggcgagaagccgcggcggggccagcttgcctgccggttttcaggaatctaaactctcatcttgtgcaatttatcaggtgtggaactgttctactgtgcgtgtggtgtgctcgtggtgaataagatgaaatgtatatcagaaaaaaatctatctctaatttagagtgcggtacataattatatccgcaaataaagaagagacaaaggcttgcgcggcccggtgtcgggtttgtgtgttcgtaccagccgggatcccctggcgctgggaggcgtgggaactggctcccgccggctgaaaccggagatggtgagcagctgtggttaaagggtccggggagggctctagggagtacaaagattagttggcggcgaggaggctcctcaggtgtgaggaggaagctgaagacggagagtgctgtagcggccccctcagctgccaggtcgaggtttgttcgaatctctcccctgggggcgggtccatctgagaatttggtggaagctctcaacttccaacctcaaaacagagagggacagggggagcttttatgtaccagaactttataaatttgttcaacaaatatttataaacagccaatcagggctggggcagtgttggaaacctggggaaagaaactcagccttgccttccgggagcttacagtctagtgaggtggagacaggcaataaacaaggacaggcaggaatccacaacgtgacttcagattgtgaagagggctacaaaggaagtcagaagtgggctgtgcctttcaccaggtccccagagccacgagccaatctggcccggcaggaggcatctgccacccaggagaaccctgccgtgcaatccaaggtggggtttgcacagccatagcaaagagatctgactctagaatcaacagcctcaagttgtagggtcccagtctccccctatcttgcgcagcctgtctgataaagtgtttgcctgaattacccgaaagatctagtcttttttgtgctgatcccactccaggcgcagcacctgcactgactccaggagggccagtccagggactgttgggaaaggtcagagtcagactttctgggtgggagctgggagtgcaagtccgctgggtgggttccagggtccgctgtcaccacggaggcagaggcttcgttaggaacgacttctccaggtgcgaatggtgcacgggaaagaagccagggagaatgcctaagtagggtgtgtgttgctccccgcccgcttgcaaggggcatgtgagaggctaggtgaagatatgcgtgtggggtggggcaggctgcatcgtgtgttgtgagaaccttggtaagtgtgtgtgcgtgtgtgcgtgtgtgccgagcatccgggtgggcgtgctccctaaagcgcctgcgacagaggtgacctcgcatcaccctggttctgcggccacagacctggagtgggaagggaggagggataggacccggtgtcctcagccatcactgtggctctaatgctttaaaacgggccatctgagaagtccgctaccttcggcctaattccccggggtcactattgtcgcgtgttcaggatccggcactggctgaagggtcctcagtttctcgtcttcccatgaccactgacgtctcccaggcctggggccgaggggtggggtggggagctgattgttcttcccccgccccaactcccaaggtttctcagcgggtccacggaccctggggtgctctccgagtcagtgtgtcgccttcagaaaaatcccggacttctatggtggaagggaaggtgggagcgtcacgctgcaccatctctgtccttcccgtctttaaaaggtcgaaggagacactaggcaggctccggatagcggcgccaactctgcgggctcgcctggatccgctccactaatcctggctccaggttttgtgctcagcttgcagcgtctcttgtcctagggggcgaatcctgagggtggcaggggcgggagaactagcaccctagacgcccaagggaaacccgaaaccctggtcggtaggacaccgatacccggactcgcatccaggctactgagagaaataaggaggaggagtggatggcacccgtctctgcacctctcatctcccccacccatctacccccacctccaccatcactaaagcgtaaaggtagatgttgaaaggaagaagtcccagctttcctcgcagtgggctcgctgtgcaagtccaagagagcagatagttctggcaaggctcattctgggatcggattgagaaggagaggaggaatccgcgtcagccccacagggctcacatcagttcttatggggcaccctagctggacgtgctgcagaccctgtaagctgtccccacctgggtccgcagcataagtgtgtaggtgtacctggccccttgccttggggccaggacctggaaccaccaagacccacgtgcgccggcggaacccaggatcgcgatcgcacggtcccaagaccgccctgcctcgccccctagcggtgagagcgcaaactgccggcccgcaaggacggttctccaccctagtcctaaatgcttcttgtctccccctaccccacctcctgcttagttgataagcattgcttctttctagtgctttatttcaggtcctcaacattacaaaagtttttagtcatttttccccaaacatggatggatgcttattattgaacatgttttgttatatgacaccgtcttatcccagggactgagtgttcctcacttaaagacctggtagggagggagccaaacaggctccatgggggccatccaggaagtggagaggatccaggccttgctattctagaggggacttcagggacaagagccagagagaggctttggtcaaggagggggcaggtccctaggtgggctccatcctcaccatgagtgagggtgtggtagggtactcagtcctggacagccaaggattcattcgttgcacttgtttgacctcagagagccagccttgggtgtccttctcatagctctttcgttttttccttttcaagattatgaagaatttctaatgtatagaaaaggtgaaagaattccacactgaacatacatacacccacacccaccgccgcctagactggatgattaacagtttaaaacactgtatctaccccatacctatccatctatccatccaacagtctacctgtaaaaaaaaaacaacattcaaaagttgcagacatcagtatatttccctcccaaataattattatcatttttgagacagggtctcggtctgtcacccaggctggagtgcagtggtgagaacacagctcactgcaaccttgacctcctgggctcaagtgatcctcccacctcagccccccgagcaactgacaccacaggcaaggcatgtgctaccattttcagctaatttttaaattttttgtagagacagagtctcatcatgttccccaggctggtctcaaactctgggctcaagcaatccccctgccttagcctcccaaagtgctgggattataggcatgaacccctgtgcccagccacccctcccaaatttttaagctttcaggacaagtaacagtgacattcagatagcacagcatcagtacagcactaatctgagccacactggagaccaaggcaaaaaaagcaatatccatcctttctttacctcagatattgttattttgcttacattattttgaacgttatggttcacttttgcattaattttgatttttaaaaaatattgcattaaaattttatttatattgctttctggattttttgcaccctcttaaattttgctaccaaaggaaatgcctcacttgcctcatgctaatcctggtcctggatgtgaggccaggcctgggagatgagctctgcccccccgggagatttggattgagatttttcaagagtctgactatagctggttccacagtgatgctttgggcaccatctctgccagttgtggagtccaggaaggcacagtgagagcagagcctctgaccagggacacccagcagcatggtccagcagagtcacatagcgggtggggtggagggagctttacgattccagaagcttccagcaaccctcttgggggtgggatggaaacagggtgaaaaggctgaggatgctatagaggggttggtggtgtctagaagggaaggcggtgcagctagaagggagagcacaattaaaggaattgttagtgtgattcagttcctgtttcaaggtctggtagttaaacaagatttatttatcaaatatttgttaagcacccactctaggccacacactaggctaaggtctaatgtgtgggaatgcaacaggaaacaagacagacatggcctctctggtagttgtcagtgcccaccctatgttccctagatgcacctaagtttacctgaagctgtggaacatgaaccactgccagtgcctccatctctcctcatctccctgagggctttctaggctaccttgggagcatgacttggaattgtcgggcagctaacagcccctagtgctcaatcaattggcaataaatgcctgtctcctgtcctgtgatgggaccattttaggtctattccacaaggtatcttggagggtccccagcaggattgaacctcaggtgtccacaagctcatcaaagcaatctttatttggcctttcccccttccttttcttcctttccctactttcaaggttcacctcccacataaattgactgcatctgaatctttgtcttagggtctacttttagggaaaggtaaatgaagatcctatattcacagtgcttctaatgtaatatagtggtccccaaatatctttccataggcaggtgccaggctgggtgaatcagaataaaatggggagctttctagaaattcctgctccccacaaaacccctagattcagattcagaaagacctttctcctccttctcttcctcctcctcaaccccctcctcctcttcttcctccttctttcaagttcccaacgtgccactggcttgggaccactaatattgagaaggtttggtcaatgggagggtggtggatggatggatgaatagatggatggattagtaaatgctttgaggtcaagggttggatggttgagccaatgaatagatgaatcagtgagtgaaggaaaaaaatggattatagatgaatggtggaccaataaatggtccatggatgaaaggaagaaaagaaggaaacataaacaggtccatagcaacaaactttagtaaactccacaagggcagagatattctctgtttggcaccctactggatctccactatctaacacagacctgatatacagaatgttcttaataaattatgttcaaataaataatgtattttcagaaaactatcgacacattaatagtactaaagtcacagaaactatgaggtcaaccaggagagtgcatgaacatttaaaaagcaccgggccagtgaccttggataacagcaatatttaaaggtcaggcaggccagatgtggaggctcacgcctgtaatcccagcattttgggaggccaaggagagcggatcacctgaagtcatgagtttgagaccagcctggccaacatggtgtaaccccgtctctactaaaactacaaaaattagccgagcatggtggcgtgtacctgtagtcccagctactcgggaggctgaggcaggaaaatcgcttgaacccaggaggcggaagttgcagtgagccgagatcgcaccactgcattccagcctgggggacaagagtgagactatttctcaaaaaaaaaaaaaaaaaaaaagtcaagcaaatgaagagaaggaggaaaagaatgaggagtcaagattgataaaacatagtctgacagggaggagaagaatataaagagaatgatatcctggaattgaggaaggacaggttgcaagatggagaaaatgataagaatttatttattttctttctctggacacatatcatcttgatttgaggcaggcatggagatgtgatgatatagttcggatgtttgttccctctaaacctcatgttgaaatgtgattcccaatgttggaggtggggcctcgtgagaggtgattggatcatggggaaggatccctcatgaatggcttagcaccatctccttggtgataagtgagttctcactttgagttcacgtgagatctgactgttttgtttaaaagagcatggcaccccacccccatccctcgctcttgctctcaccatgtgaggtacttactcccgcttcgccttctgccatgattgaaaacttcctgaggccccatcagaagtggatgctggcactgtgcttcctgtacagcctgaagaactgtaagccaattaaatctcttttctttataaattacccagcctcaggtattcttttatagtaacacaaatggactaatacatgtgtgtactctttgtttctaaattttggagtagaagaaacacacctagaagcttctcaaagaagagtgagatcagacttggaaacaattgtcatggagcctttactctgaagaggtgttcaaagcgggagagttgaagaatacaagtaagtaaggccgaccaagagaagctgaagagagaggaagctgacgaacaaagatgaggactgaaaagaggctgccgtcggttagattcccccagcaacagacctatttgactgaagtagttcacatgagagctgataccaagaagtaccagtagcacagtggagaagtgagacggggaaggaaaggaagaatgtcaattcaggaaactttatgggtagggaagcacctgtcaataatgggagcttaatccatctgagacgtctgggaggtgagagtttgccactaacagcctctcattgaaataactatcaaagaatagacttcaggaagaaagaaacttaacccacaaggaaggactatgtaggaagcaaatctgtgcctgagcaagtactgcccatagaaaacaatattaacaataaccaattcttgggatctaaggtggaactaaaattttggtaaataacctctaagatgggagggaataattgaagtcttatcttctatggctttctaattcaaatatagggagaaataccattaactttaggcttaatgatgagcaagagtgttactcatacaccaccactatcacaaccatcaatgacaagaacgacaacaaatggatggagaacgtgtaacttccaacctagtagaaggaaaagagcaaataaagaaaacttgcacggatctgggtgcggtggctcatgcctataatcccagcactttgggaggccaaggtgggcggatcatgaggtcaggagttcgagaccagcttggccaacatggtgaaaccccgtctctactaaaaatacaaaaattagccaggtgtggggcatggtggctcacgcctgtaaccctagcactttgggaggccgaggcagacggatcacgaggtcatgagatcgagaccatcctggctaacatggtgaaaccccgtctgtactaaaaatacaaaaaattagccgggtgtggtggcgggcgcctgtagtcccagctactcatgaggctgaggcaggagaatgatgtgaaagtgggaggtggagcttgcatcgcgccactgcactctagcctgggtgacagagtgagactccatctcagagaaaaaaaaaagccaggtgtggtggcgcttgctggttgttccagctacttgggaggctgaggcagaagaatcgcttgaacctgggaggcagaggctgcagtaagccgagatcatgccactgcactccagtgtgggtgacagagcgagactccgtttcaaaaaagaaagaaagaaagagagagagagagagaaagagagaaaaagaaagaaagaaagaaagaaagaaagaaagaaagaaagaaagaagaaagaaaggaaggaaagaaagaaagacaagaaagaaagaaaacatgatcaatgtagaagtcagggaaaaagaaggaaatgaaagaaaaggaaaagaaagaaaaggagcaaaataaaggcccttccagtcaatacagggtagtaaaaataaatgaataagtaataaagataagtggactaaactagccagtcagaagacaatgattctcagattgaaatttgaaagtccatctatacactctttgcaaggtatatatctaaaacaaaagatggagaaagattaaaataaaaagatggaaacatttgccaggctaatactaatcaaaagaaagctgccagcggggcacagtggctcaagcctgtaatcctagcactttgggaggctgaggtgggcggatcacctaagctcgggagtttcagaccagcctgaccaacatagagaaaacccatctctactgaaaatacaaaattagcagggcgtggtggtgcatgcctgtaatcccagctactcaggaggctgaggccaaagaattgcttgaacccgggaggtggaggttgcagtgagccgagatcgcgccattgcactccagcctgggcaacaagagtgaaactccatctcagaacaaacaaacaaacaaacaaacaaaaaatgacaaaatatgccaggatgattattctaaacttggtgtttttaataacacaggttccaaatatagaatgtagagaaatggactaatttacaaacatagtaggagagtttacttattttttattaaaaacaatttttttgagatagtgtctcactctgttgcccccggtggaatgcagtagtgtgatcatagctcattgcagcctcaaattcctggactcaagtgatcctcctgcctcagtctcctgagtggctaggactgcaggtgtgcactgccatgtctggctactttttttatttttatttttgtggaaatggggtctcactatgttgcccaggctggtcttaaactcctggcctcaggctatccttgcacctcaacctcccaaagtatgggattacaggcatgagccaccatgcccaaccaaggagagtttaacatactttctctgatattcaaattaacttgcctttttttccttttgtttgcttttgtttaatatgcctttgcccatacttcaattttttattttttatttttatttattttttttatttttgagatgtagtcttgccctgtcacccaggctggagtgcagtgttacaatctcagctcactgcagcctccacctcccagattcaagctattctcctgcctcagcctcccaagtagctgggattacaggcatgtgccaaaacacccagctaatttttgtactttaaaagagacggggtttcaccatgttggccaggctgatcttgaactcctgacctcaggtgatcctccaatcttggattcccaaagtgctgggattacagccactgcacctggccatacttcaatattttaagttttattttttgtattacatatacacataatttaaagaatcaatgaattctacaagttaactaaaatagcactctgtagccccttcctccaatttctccttccccagaggcaactactttcaattcttacacttgatcccgttttatttttttttgagactgagtttcactcttgttgcccaggctggagtccaatggcgagatctcgactcatcacaacctccacctcctgggttcaagcgattctcctgcctcggcctcctgagtagctgggattacaggcatgtgccaccacgcccggctaattttgtatttttagtagagatgggattctccatgttggtcaggctgctctcaaactcctggcctcaggtgatccacccgccttggcctcccaaagcgctgggattacagatgtgagccaccgcacctggcacttgatccttttaatatttatctccacatctccaaataacatgcttatattgggccaggtgtggtggctcacacctgtgatctcagcactttgggaggccaaggcaagcagatcacttgaggtcaggagttcaggaccagcctggccaacatggcgaaaccctgtttctactaacagtacaaaaaattagcttggcatggcgacaggcacctgtagtcccagctactcaagaggctgaagcataagaattgcttcaacctgggaggtggaggttgccgtgagctgagatctcaccactgtactccaaccttggcgacagaacaagactctgtcctcccccaccccctgcccccacaaaaaatgcttttattgcaatttctttatttttcattttggaccttaattattgactcccactcaggaaggtgaggttttagtccatttcctaattcttctccagtctacatccccgccccttcagtttcccagtatagttacatgatcattttagttagcttagtactcaagatttacattgtatgatatgtgtactaattagagctggggcatgtgataaactatgattacaattcctttcctgtacaactttttattgtataagaagttgcctttttgtttgtttcaaattccttttttttttttttttggagacagaatctcactttgtctcccagggttggagtggtgtggtgtgatcatagctcactatagcctcaacctcctgggctcaagcgatcctcccaccccagcttcctgtgtagctgggaccataggcatgcatgcaccaccatgcccagctaattttttgattttttttttttttttttttgagacaagctgttgcccaggctggagtgcagtggtgagatcacagctcactacagtcttgacgtcccaggctcaagtgaccctcccagctcagcctcttgagtaggtgggaccacaggcacacaccaccatgcttagatgatttttttttccatagatgaggtcttgctatgttgcccagcctagtctcaagctcctgggctcaagcaatcctcctgccttggcctcccaaagtgctgggattacaggcgtgaaccactgcacctggccaactgttttgatttcttgtagagacagggtcttgccatgttgccctggctggcgtcaaactcctgggctcaagtgatccttggcctccaggtgtgagccactgctcccagcctcaaatactttttaataactgaaccccaaactctcctccaattgtctaaacacccctcaattgtttcattcacacaaaatatggtatcagtttccctttcctgaagaagtctctcccaaagcagacccactccaacctggccagcaccccatatgcctgtagcacagctgtcctcttgggatccggcttttcaatcacctcagggttctcttacttcacttgtatgttgcagctcctgtctcctgtctcacgtgatttctctttcttggtttactcccttgttttgaagcagattccacaatagcttctggaatataagggaggttatggaaggtacatttttgaggccttgaataactttaaatgtctatattctaccccagttcttgattgagggtttggctgaattctagtttggaaaccatttttctttagacttgaaagcactttccatttgttttctagttttcgatgttgccaaggagaagtttgaaattgatctttgttcttttgtatgcaaacattttctttctctttggaaacgactggatgttctcattgtttccagggaactgaaatttcatgatgtgtgttcatgtagatctgtttcctttcattgtggcttcttcccaacacagcaactcaagtgcttcaattctaggaagttgccttgaattgggatggccctctgtatgttttctgttctgtcttttggaacttctattatttgtagattagaactgctcctctaaatttcttatttttctttcctctttccctctttctctacacacacatactttattggagattttctcaactttatcttccatctacgaagtttttcatttctgctatcttgtccctcaccccaagcccccgaaaccttcttttggttctcttaacctccctgttctatagcaaacttttcttgtttcatggatacaatatcttcttctatctctttgaagatattgtagtaataatgagtattttaaggtttctctttttcacgtagtctctattgcctcctggttgattttcttccctctttgtatgctttaacctctggctttcatgttagaagcgtacctcattttaaagactggggtagtacaggctgattgggctagtagaggctgattggaggtgcagagtccatggaagagtcctactgactgtgagtttcatcgtaaaatgatctcaatgggctgtttgagggagaacatccaagaccaattcacttagagttttcctctcaggttggataagaatctcagggaagattcttccattctttcgctgaagggtaaaaacttgggaacctatagagtatcaggaacaaagtaggggaagagactgggatcttagcattcattatgtatattgacttaatcattttgttctcagttgatatccttgtttagagactatttgttttactctttgcaaagagtcaaacctccagtctttttggggaattctggaggcagttagaaagaagagcacctatagacttcggcaggcttcttcataaaatagttttaacaagttctccttattttggccgttccacttttactctcttttctagaagaaccttgtgccactaattcctgagacttttcagcattgtacagtgtgaaacagattagtgttcagcttttcccagagcagctggggaatcaggttttctaaactagataccacttgcatgtatactttccagttcttgaaatctctctctcccattctcctattcttgtagggttttccttttaaaaaaatccccttattgaggtgtgaactgtcagtcccctgccccctgctccatctacttaacctgagggcttagaggaggacatagcactaacttacctaacacattctcaccaaccaaggctctcgtcacctgtgatcaagggaacctgccccatagtaagcaccttatgggacactctgctctattccccagggaaggaagaccaaagtgacatctgagctggcccttaatgaggattctagaggcaaacgatgtagggcagagcatctcggtctgcatcaacaatacatatgtgcaaaggtacaggctactaaaaggccacagcatgccctatatctgattattccaaccagtgggttagcaggatctgggatgaagttggagaccctgtgctaaatcacctgcccccagtcctagtctgccacctgtctcctcagttacgtggatatcctttctgtttcccaggcagttggcccaacgagccctgaaccaagtccagcacaaggccttggtcagccatgatgaattaaggttcaacagcctaatttgatacctgttctcatcacatcctccccaccaagctgcaggcagaatgcatggcacatggtttccttggaacagttttctgatagttctaccgtctgagtcctgtcatgaaggctctctaaggaacaagactagatacatcatatgatcacctgtgtgtgtgtgtgtgttacttaggacaggagccaacatggccataacttaaaccaaatagaaggtgtatttaatgtgggttctgattcactacatccgtgaatgtgccctcatttagaaatatagttgttgcaggtacatagtacagatataatcagtgaagctcatactgaagtagggtggggccctaatccaataagactggtgctcttagaagaagaggaaaagtgggctgggcgtggtggctcacacctgtaatcccaaaactgtaggaggtcgaggcaggtggatcacaaggtcaggagttcgagacccgcctggccaatatggtgaaaccctgtctctactaaaaatgcaaaaaattagctgggcgtggtggcgcatgattgtaatcccagctacttgggaggcagaggttgcagtgagccaagatggcaccactgcactccagcctgggcaacagagcgagactctatctcaaaaaaaaaaaaaaattaaaaaataaaaagaagaggaaaagagacagatacactcaaggggagcaccacatgatgacggcagcagagactggagaggccaagcaatgctgaggattgcaggtgtgttcgtcactgaggattgcaggtgtgttcgtcaggattccccagagaaagagaactaatattatatatgtatacatacttacacacactacatggaattgggttactcagttacagaggtaagcaagttctaagatcttcagggtgagttggaaagctggaggcccaggagagccaatggtttagttctagtctgagtctgtattagtccgttctcgccctgctataaagaagttcctgagactgtgtaacttccaaagaaaagagatttaattggctcatggttctgcgggttatacaagcttcacttctggggaggcctcaggaaacttaacaatcatggtggaaggcaaaggggaagcaagtactatcttcacatggtggagcaggagagagcaagcgaagggagaaacaaccagatcttgtgagaactctaccacaagaccagccaggtccatggtgctaaaccattagaaccaccctatgatccaatcacctcccagcaggccccacctccaacgctgggaattataattcaacacgagatctccgtggtgacacagagccaaaccatatcagagtccaagtccgaaggcctgagaactggccttagtagtgtagttccagtctgaaggtcagcagtcttgagaccaaggaagagtctatgtttcagttcaagtctaaaggcaggaaaggctgggcggcggctcatgcctgtaattccagcactttgggaggccaaggcgggtggatcacctgaggtcgggagttcaagactagtctgaccaacatggagaaaccctgtctctactaaaaatgcaaaattagcagggcatggtggcacatgcctgtaatcccagctactcaggagggtgaggcaggagaattgcttgaacctgggaggtagaggtttcggtgagccgagatcgtgtcattgcacttcagcctgggcaacaagagtgaagctctgtctcaaaaaaaaaaaaaaaaaaaaaaaggaaaaaagctgatgtcccagtccaaagccattcaggcagggagagtcagcctctttgttctattgaactgattggatgaggcccactcacattaggaagggaaatctgctttactcagtctactgattgaaatgttcatctcatcctaaagcactccatagaaaacacccagaaaaatgtttgaccaaatatctgggcagccagaaaggctgacataaaaccaaccatcatagctgacagcaccaggaagctaagagaaagctgtggaacaaatactaccctggagccttcaagaagagcatggccatgccgacaccttaattttagccttctgcctccagaagtgtaagaaaataaatttctcttgtttcaagtcatcctactttgtggtactatgttacagcagctaggaaaataatacagtaggcttctaaagcattttttttgagacagagtcttgctctgttgcccaggctggagtgcagtggcacaatctcagctcactgcaacctccaccttccaggttcaagtgattcttgtgcctcagcctcctgagtagctgcgactaaaggtgtgcaccaccatgcccagctaattttttgtatttttagtaaagacaggctttctccatgttggccaggctggtctcgaactcctgacctcaagtgatctgccccacggcctcctaaagtgctgggattacaggcgtgaaccgctgcacccagcctaatgtatttttttctagtcatttccatgggtaaatctttacagccctagattttgtctagtgctacagtgtgcaatagagtagccactagctacatgactatttaaatttaaactaaaattaaggctgggtgcaatggctcacacctgtaatcccagcattttaggaggccgaggtgggcagatcacttgaggtgaggaattcacaaccagcctggccaacatggtgcaaccctgtctctaatgaaaatacaaaaattaccggggtgtggtggtgcatgcctgtaatcccagctactcgggaggctgaggcaggagaatcgcttgaacctgggaggcagaggttacagtgagccgagattgtgccacttcactccagcctgggtgacaagagcgaaactccatcaaaaaaaaaaaaaaaagaaagaaagaaagaaaaattaaaattaagaacattttaaaaattcagttcttcagttacactattcacatttcaagtgctctgcggccacatgtggttactggccactgtgttagacacaacagatactagatcatctccatcaatttgcacatttccaatgtacaaagttctgttggacagcattggtctagtgtattagtcggttttctcctgcaataatactgcatagcaactccagaatttcagtggtttataagaataaacatttttcttgttcagaggtccatggggcagctcaactttaggttgcaggttggctggacttggcttcggactgcagtttaggttcagatctgctccatgtatctcttatcctctttggactcaggtatgttcctctcatgactaaaagcaggagtgcaagaaggcaatctaaaccaatcatattcagttaacagtccattggctaaagcaagtcacatgaccaagcctaatatcagtgtcctcaaggagaggctctacaaagttacaaggcaaatggtatggatgtatcatcctactataaaggagtgaagaaaaaaaaagtaaaggaatgaagaactgggaataataatccaatctacctcatgtgccaaacgcttataaagaccagcctgggcaacatggcaaaactctgtctctatgtggtggtgtgcacttgtagtcccaactactagtgaggttgaggctggtcttgaacttctgggctaaagcagtcctcccacctcagcctcccaaagtgctgggattacaggcatgagccaccacactggccatccccgttggagttgcctctcatatatatataaaataataatatatataatatatatatttaccttggtgcttttctttttttcttttttgtgagacaaagtttcactcttgttgctcaggctggagtgcactggcgtgatctcggctcactgcaacctccgcctccagggttcaagcgattctcttgcctcagcctcccaagtagctgggattacagacacctgccaccatgcccagctaatttttgtatttttactagagacggggtttcaccatgttggccaggctggtctcgaactcccgacctcaggcgatccaccagcctcggcctcccaaagtgctgggattacaggtgtgagccactgcgcccagccagtgctttttcatattaatatacatagacacaattcttaaattaacattcactaacttacatttactggtttctgtgttctgctggtccccctcttaattaacttaacgatggttacttcagatatctgaacaatggacgtgtgttgaaagacaacacaacctgatttttgccactgggctggctcccaatctggtttaggtgtgttaacaggctgggcccgtcgtctcaagcctgtaatcccagcactttgggaggccgaggcaggcggatcacttgagccaaggagttcgagaccagcctggccaacgtggcgaaatcccgtctgtattaaaaataaaaaaaattagctgggtgttgtggagcatgcctgtaatcccagctactcgggaggctgaggcaggtgaattgcttgaaccggggatgtggaggttgcagtgagccaagatcacaccactgcactccagcctgggtgacagagccagactccgtcttaaaaaaaacaaacaacaacaacaacaaacactgttaatagaggttcttgagataagttaggagtttcatttctcgcttacaatatcttttgtaactaatttgattttatctctcaaactgaagtgttatagacctggtagagtagattcaaggcagctgctctattctttttcttctttcaaaatggttatggccagcatgggcaacatagtgaaatcccttctctactaaaaatataaaaattagctgggcgtggtggtgcacgcctgtaatctcagctacttaggaggctgaggcgggagaatcacttgagtccaggaagtcgaggctgcagtgagccgagatcgccccactgcacaaaaaaaggttgtagtaaaacaactgctctaattcttacccccttagctagtgaaaagatggaaatgcgacaggatagagcgcgacgagtgcttttagggctaaaactgagtgggtcacacacatggcctcctctcccacccgctcctggccagaatttagtcacatgagcgcatctagatcgcagccagacggatggccacgtgggagtgggaggtgatgccactaaaagagagggaatgcttggggaacaatcagcagtcttttctcagggtttgagaaaacactgtgtcttagtgagaagacacagtctgtgcgagttagtaaagtgaacagaactgagtagtcagctccctagtcaagaaattgaacagtcggcagagtttgagatttcttaacgtaaaggaagcgtcaaaagataaaggacccttctagccaggacgcaagactgagggcgagacagccacgcggaggcggggccgccggcggtcgaaggtgcgcgcccggccgacggtgcgcgcccggccgacggtgcgcgcccggcaatggggcgtggccaggcagagaggcggggctccaccgagcgcggcgctgaagctggcagccagaaaggggcggggcctggcggcgataggctttggggcggggcttccaaaccgggcgtcccggctagagtgaaggggcgtgggcactcataggctattgggggagaggttaagaaacgtagaatttcgcagccagaatgggtacgtctcagcgatcctgaaagcagccttgacagccagaggcgagtcaagtggaaaggctggccgggcttcgagaagggagggggcatcgaggtacttaaaggcctgaatcgcgcggcgtgacgtcgggggcgcggtttcgcggcgtctgggcggacactgcgccgaggggcggggctggacgcgcgctccaagatggcggcgaacgtgttcccgttccgcgacgcccgtgccgcaccggacccagtgctggaggccggcccggtggcacacgggccactgccggtaccgctggtgctggacaacgggtcgttccaagtccgcgctggctgggcgtgtcccgggcaggacccaggtcccgagccgcgcctgcagttccgcgcggtgtgcgcccgcggtcgtggcggggcacggggcgcgtcgggcccgcaggtggggaacgctctgggcagcctggagccactgcgctggatgctgcgctcgcccttcgaccgcaacgtgccggtcaacctggagcttcaggagttgctgctggactacagcttccagcacctgggtgtctcctcacaggtgaagggcggagtaggctgggctgggctgggtttgaggggaggggtgcggtctcgtctccgctcactctgctctcggagaggtaacagtcacttcagtagctccgattgtcttttagtcgaccagatgctaggcgctgtgggtgtagcagcgaataaaatgctgctccttgtatcttggagcatacctttgggcatatatgcttgtttgttaagaagcccatttattaacaaatacgtattgagcacttactctgtgtcaggcactttttaggcatttggagtacatgtgtgaacacaaaacttcctgtgcttatggagctgttaatactatggaaagatattctagtatgaaaaggcagacagtaaacatagaaatagtagattctacgccgtgataggagaggagggagttacattttttcagtaagatggtcagggtaggactcgtgaaggtgatgtttgagcaaggacttgaaggaggtgattcaggtagcaagccatgtgaatatctgaaggaaaaacggtccaggcagagggagcagccagtaaaaaggccccgaggcaggagtgtgccctaatcctaactgcaaggctgcctgtgtgagggggagagtagtacctgaaagaggatgtcagagaggtagtggagaggcagatcacacaccttataggcttttactgagtgaaatggggagccatggcagggtgttgagctgaagaaggacctgacttgtgttttaaaaggatcactattactgctgtatggagaatgaattgtcttggatcatagggtggaaacagggacgagttaggaggctgttggaataacccaggtaagggatgatggtggcttagatgaggcagatagcagggaatgtcattagaagcagttggattctggaaatactttgaagatagagccaacacgatttgctgacagtttggatgggaccttgacttaataacttaaattgactctactttcgtattttcaagtaaagatgagatgggagttttataatcgcctctgatcaggtttttgattaagaagccaaaagcaaattcagtcctgcaataaggattttgggttcttttatgcttcaaaaagagtattctgttaccactcatttatttgcccttttctttcaaagtagggctgtgttgatcatcccatagttttgacagaagctgtgtgcaacccactgtattcacggcaaatgatgtctgagcttctttttgagtgctacgggattcccaaggttgcctatggaatagacagcctcttcagcttctaccacaataagccaaagaactcgatgtgcagtgggctaatcatttcatctggataccagtgtacgcatgttttacccatcttagaagggaggtgagttgcacttgtggcatttgagtgcgattttgagaagcattcaggaaacatttatttactgcgtgctttaaaggcagagtagaaagagcaagtactagcctgtgaactgagccgttgggcttagctttgaactacctcactgtgtgactgggtaagtccctttgcccatagttgtgtcctttgtgaccttctggagggagttggggtggatgatctcttagttccacatccataattctacaatattataattctgacataatggggagatagctaacatagtatctgcaggtagtaggcattcagtagaaatgttttgaataaatttaatcgagaccatctttgtgttctggagttttttttgttttttttttgtttttgtttttgtttgtttgtttgtttgttttttgacagagtcttgctctgttgcccaggctggagtgcagtgggatcttggctcagggcaacgtccgcctcccgggttcaattgattctcctgcctcagcctcccgagtagctgggaccacaggcacctgccaccattcctggctaattttttttatatttttagtgagacagggtttcaccatgttggtcaggctagtctcaaactcctgacctcaagtgatccaccctccttggcctcccaacatgctgggattacaggggtgagccaccgcgcccagccaatttcaagttatttaatcactattgtttagacctttcaggtacagtgcctggcacgtaatggacccttactaaatattttcaagttgaataaaaggcaagggtagtttatgtcatatttaaaaatctgttgccactttatcgttgagctttaactgtctgataagagcctaggccaccactgtgttctcctgaggtttctcacattggcacaaagagacccacgctttacagctgaatgcctgggtttgcagctctgctacttaacttcctcacttcatttcctgatacgtaaaattgggaaaaactgatttcccagggttaccctgagaatgaaatgagataaggtaggtaatggcactttgtaaactgtaaagcagactgaacatataaggcaaataccattgaatttctcatgaagtttctatgaaaatttttgaagaaaaaagtaattcttaggtgttaccaaatgctcctgatgtatgaagttctctatgtaaacagaatatgcaaaaataaaaagtaacatattttatattgagagaaaattacctgaaggctgggaaattatcagagtgaatcatatcgtgttctatgctggcatctgctggtgaggtatgatacagcagtgacattttagttccctacagtaagttcctagtgctctgccacttactttctcacattaggaaaataaaattattctggttcttttacagtaagtcaggatgcgtgtggttacttaacgtgtttgcttcagtagatgtggagtgttaagggagggcttcttaaactctggccttcagtcacctagggagctcattaaaatgcagatccccaggccccaccccagagcagctgtgtcctgggaattggcatgtttaaaatttcccccagctaattctgggatacctggtcccaggactacagtttgagaaatatatgacgagactcattaagatctgactggagtgcatacttgttaggtggccgtgtgactgtatgggtgagctaggaatgcctgcctagataagaggttataccaggggaacttcaacgtcccttctgactatcaggttttgtatttctcctgctggtctgtttcttctttatctgccttaaattatcttgtttctcccaagatgctccatatttctgtcctccagaaatttcagtgctgttttctactgcttggttatagattagatgctaaaaactgcaagcgcatcaatcttggaggaagccaagcagctggttacctccagcgtctcctccagctgaagtaccctgggcacctggcagccatcaccctcagccgcatggaggagattctgcatgagcacagctacatcgctgaggattatgtggaaggtatccaagaggatgtttgcctgcagcttttgggtgttgtctaccttgtattccttaaattattgccagcatgattctttgcttgctcactttttaagcacctccttcccctttttgtattccctttcttaaactattcagtaaactgataacttatgttgtataggttcccttcacaaatggtagcttttataacttgcctttaatacagaacttggaattgcacaactttcagcttttccagatattaaatatttttaagagtgagcagaacatatcagactaaaaatatcttaagctagaaaacaattgaaattgttttattatacccttataataacatctatgctgcagaaacacctctttttcttttcaaacttgtcttggacttttggttgtattttacttcaaattaaagtatgagttttagttgctattgtcacatgaatgtgatgaaaatatcttcctcgtgaatttaaatagttcatataaaaccaaaggactacggacaatgccactgtgaatacaactctattccaagaatggatttgcttgttgtcattgagggtactgatctcagctgaccaataatgagctcctgaaggacaaaaactgcatcttttttttttaattgtgaaaaccatataacataaatttgccattttaaccatttttaagtatacgtttcatgtgtgaagagctgtgttttaattaactttagaaagcatttattaaacatctgttattcctgggatacaaagaagttgcgggagacagatagggaaataaataattgatgaggacactcagtccggagagttagaggcttgccagaagacacggctgaggcacacagctctccgtgctcccacttctctgttctccagttgctctggtattgactctttttttttagttaactttttcttttacaattctatgatatgattataaagagagagcatgagggaattttttgggatgatgaactcttccgtatcctgattgtggtgttgattacatatgctttctctttataatcatatcctgtttttatccacaataaacaggaacaaactactgatacactcaacaacttgaatgaatctcaaaggcatgatgttgagtaaaaaaaaaaaaaagtttcaaaaggtacatactatttgattccatttatgtgacattttgaaaagataaaaccatagtgatagagaagaagtgagggaaagattgcctgggcttgggatagagacaagcttttgggtgaacttgttttcatttctccagagtaaatagattgctgggtcatgtgcttgcatggtatgtctttccgtccttctacttttaatctacctatatcattatattcaaagtgaatttcttggtagttggatgatttttaaaaaaaatctattcagtcaacctctatttaattgttagactaaaccatttataattagttttaattattcatatgcttggatttaggttcaccattttattatttgtttttgttccttctgtttattgttcctctgtttctctctcctgcctccttttaggttattcgagctttttttttttttttttaaagtattttatctgttgtgttttttactctacctttttattgtagtttttagtggttgctttagagattacagtaaacacaacttttcacagtctacttagattctgtatttaccacttcaaggggaatgtggaaatgttagcaatgtacagactcctttatttcgcccggtttatcttaaagttgtcttatttatttcatctgtatacattggaaacccatcagacagtgttgtgatttttactttcagttgtcaaataggttttaaagaactcgtaaggagattagtctgttatgtttaaccagatttttatcatttctgttgctcttccttcattcctgatgctccaagcttccttctggtgttgtttctcgctgaagaacttacttagcagttcttttagaacaggcctgctggcattatgtccaggtttggtagctgcttttagttgattgagtggattcagggattggatggagtgtattttctccatctgacctatgtctgaaatgctggtactgactttaaaaaaaacaatggagtcggccgggcatgggggctcatagctgtaataccagcactttgggaggccgaggcgagtggatcacgaggtcaggagatcaagaccatcctgggtaacatggggaaaccccatctctactaaaaattcaaaaaaattagccgggcatggtggcaggcgtctgtagtcccagctactcaggaggctgaggcaggagaatggcgtgaacccgggaggcagaacttgcagtgagccgagatcgcaccactgcactccagctaggtgacagggcgagcctcccgagtacctgggatcacaggtgcccgccaccacgcatggctaatttttttgtatttttagtagagacagggtttcactgtgttagccaggatggtcttgatctcctgacctcgtgatccgcccacctcggctccccaaagtgctgggattacaggcgtgagcccctgcgcccagctggtattgactttaattgttgtgttaatagtgtttccatttcataactttcaaaattgtttctttgaagaattacacaaatggcggtgtcctgattattatgagaataatgtccacaagatgcagctcccattttccagcaagctcctgggcagcactctgacctctgaggagaaacaagaaaggcggcagcagcaattgcggcggctgcaggagctcaatgcccggcggcgggaggagaagctgcagctggatcaggagcgtctggaccgactgctatatgtgcaggtaatagcagacacagggacgggcgcccttccgtgttaacaagatagtctcagaagattttcttgcatatttttccattggccttaagatgctttgactgtttgtcacctttggggtcacgaaggagtccagggggatcatcagcatagaatacagtgtagaagcagctgtttctgaaagagctgtggactccagcattatttattttcaccttataaactcctttatgtttttaaactttgtaagtgtagcatacatgatgcaaagtgcacaaatctttatgtttcatcttgatggattttcaaagtgaaactcacccgtgtatctgctgtcaggttaagaaacagcattgtcagcgttccagaaggctcctttcatgtctcctcttagtaactttcccaccttccttcacatcccccgccccaccaaaaaaaaaaagggtaacaaccttttagacatctgtcaccatcattagttttacctaatcagttgttgctggaactgtgatgcaatgctagcctagagacagagaggtgggcagctgtgtgaaactggaggcagctggaggcgtggctctgggcagggtaggccaggggagctctggaagccctctccagctgtcgttttctccgtttggctttgaagctactttccttcctgtttgtgactgctctgttttcaggaacttctagaggatggccagatggatcagtttcacaaagctctgatagagctgaatatggactccccagaagagctgcagtcctacatccagaagctcagtatagcagtggagcaggctaagcagaaaatcctccaagcggaagtcaacctcgaggtggatgtggtagacagcaagccagaggtaacttagggccttggaaggagcagcccttcttgaggggaggagtgtcctgagaggcctgacatcaaaggggttgtgcccagagtcaggagggaaagagagcagaggggatgtgggtggtggtggagatggcactgaccttgtaccaactgaaattctgtcagaagggatttcaccctgtagatccccggacccctgagcgcagaaagtgcatttaacgtaggaagaacattcacacaccaaacctgtggtgctgtcttgaacctaaaccagctccactgatagtcattggcagtcatatacttcctttaattttcttttagtgttttattaaatatattgtggttgattgttcacttacctcctttccatcttgatgttccctaaggacagggatcatgcttcatacatgatttatgaattttttacagcagttggtagttatgctcaataatatatgtataggttgccttaagatcagccttttattagttgctaaagaccctttgcataagctctttgattttctcttcttcttcttcttctgtttcctcacccgtgcactgttaataagtgtttttgaggccgggcgtgctggctcacgcttgtaatcccagcactttggaagtcccaggcaggcagattatctgaggtcaggagttcaagaccagcgtggcccacatggcgaaaccctgtctgtactaaaaatacaaaattagctgagtgtggtggcacacgcctgtgatcccagctacttgggaggctgaggcaggagaatcacttgaacctgggaggcagaggttgcagtgagccgagaccgctccgttgcactccagcctgggcaacaagagcaaaactccatctcaaaaaaaataaataaataaataagtatttttgtttgtttgagacagggtctcactttgttgcccagttagaatgcagttacatgttcatagctcaatataacctcagactcctgggcttaagtggatcctcccacctcagccttctaagaagctaggactacaggtgaacgccagcatgcctaagtcatttttacaattttttgtagagatggggtctcaccaagttgtccaggctggtctcgaactcctggcctcaagtgaacctcccacctcagcctcccaaagcactgggatgacaggcttgagccaccatgcttggctgttaataagtgtcgaagtagccaaaagagcttaggccccagcatcttagttcctgtatggcaaaggggcagcctgcaggtcactcctcagtccagaagtcgctggttgagtcgcctgcctttagaactgaaacaaagagtaagtgtacatcctgttcctggatctgtcatccctagaattccaaaacaaaggaacttactgccttgagacatgttttaggcaggataaaccagactagcctcttgttttttgttttttgttttttcctttttaaatcagctttcattaagctgttgattacttatcctttcagaaaaaaaatgatactttggaaaaatgcaagtcagtgccatttgatgctgggtgtagcatagtgcttatcagtgatgtcagagttgcctttggctcaacaggaagcttgcttttgcagtgatgggctcccagctggaggctcgctcaaggttctgctctcaccgttgcatcctctacatctcattcccaggctgtcgattatgtgaggacagtacatgagtgtatgctttatagagcagatcctgagataggcttactagatacaccttattggatcaccaagatcttgtgtagaaggggcctttaccatcttcttccaacacagcatcccagatcagcctcagttgaatcagtgtgtgccttttccattttgcttctcttggtttttcaggtctttgagatttgagttgttgtttactgaaatccggaaccatgttgtctttgttatgtattcatccatatttagtttttatcatgcttgacatgttagcaggacatagttttctttataccagagcagtgccactcagccacaagcagatgagggatttcagatttcaaaaagggaaaaaaaaccaaacagctgtgaagatgtgattcttcagcagtggggaaactagtttttccttttctttgttcatttgtctgcatttgttacatgatgtgattcatcacccattcccccattctttcagcagatactcagtaggtacctacttcattttatgctctggtacacacatttaaatctccttgggtttaggggattttgaaatgccggactgcaaaagatttttctatatgcaacaaatttgatgatcagttgggccgggcacggtggctcacgcctgtaatcccagcactttgggaggccgaggtgggtggatcacctgaggtcaggaattcgagaccagcctgaccaacatggtgaaaccctgtctctactgaaaatagaaaaattagccgggcgtcggggcaggcgcctgtaatcccagctactcgggaggctgaggcaggagaatcgcttgaacccaggaggcggaggttgcagtgagctgagattgtgacattgcactccagcctgggcaacagagcaagaccccgtctcaaaaaaaaaaaaaagtgatgatcagtcgtcaaagctttaatggttagtcagcattcagcattttagggtaattcttaatgatcagagtcaattacagtcacatttgtgggataaacttgaccatgacaatggctagccagttctaccattcaaaaagtatttgtagagtttccaataatataattcatttagaatgaattgaatcaatatatgtgaaccaaaattcatattgaaattgcacttaagcagtaatggctgaactgaattaatacagctggaatttaactaatagaggtctcgaaaatctattttttcttatagaccaatctattctgacccttgctattctgcagttgtttctgtgaggatgttgtgaaggagcaggctttgttagcatttttaccaagtatttaaaccagaagatgcttgcttttcatagctacaagcacagcataagagggtaggaggggggagaacacaggttttgagcatcatcatttgttggaaaacgcaatgggccaaatatagaaagttctccggctttactagccaagatcagggttggcctctgcttcttcttatgccgctcaaggctgttttagggaaccatgctgcatcttctgtggtatgccttggcaaactgtcattccctgcagttccaaaagaacagtcatattagtgtttctgaacgccacataagacatgtggagaccctggcaaactctagcgagagagaagccagccgtggcagagaaaactattctctgttggatgcctgttctctgtgttgaaatgatcagctttgttcctctctgcgacttgtatgaattgggataaataaatgtcctttttataatttttgtgaagctaagaagttatcttaagatggtatgctttggagtgaagctaggtgaaggtgaatgttgatttttttttggcagctgaagaaacctcttgaaacccaaagctttacaatcatctctatttcaggggaatttgagggtgtatcccaggggcccaccactcagtgacaggtgcagtataccagggatgcagaggtgattaagatacaatgcctgccttcctgggtacctcaaaaacaaaaaatgagggctatagcaccatgcttagctgactgtaatgaagcgtagcaggtatggtggtaaatgtgtgtgggaatacacatttggttttttgagaaggactggatgtttcagctgggccttgaaagattatttgggccgggcacagtggctcacatctgtaatcccaacactgagaggctgaggagggaagatcacttgtgcccagcgctttgagaccaatccctgagtcacatagaccccatctctaaaaaaaatttttttaattagctgggcatgcatctgtagtctctgcttgagaggctgaggtgggaggatcacttgagcttgggagttcgaggctgcagtgagccatggttgtgccactgcattccaacctgggcaacagaacaagaccctgtctaaaaaaaaaaaaagaaaaggaagattatttgatttcagtaggtagcaaaaggaggagggaaggacattttaggtggaaagaaccacacatgcaggcatatagagtgtgaacaagaaaagctgtggtgggtgatgaagtggagatgactattaagttctttacccatcagtcttatgagcctgcatattatccttcagacattcggagccttccagggatgttgagcaagggaatgagacgatgagattttgttttgggaaactaactggtggcagttaggatgatgggttgaagggaggggtgagactgcaggtgggaaaacaaaacagatgtaggatcagatgtaggatcccaagatctcgctgccatttgcaagccaaggtgacaagagtagcagtgttgataatagagcatgtggcatgtgccgactccttgctgagcacctacgtaggtgtcctcctggttcgtgttcacaactcaatgggtaggtactatcattatcccccttttacagacaaggaaagatttggagtgaggtcacatagctagaagtagtgctgatcaaattcacacacaggcagttcaattccagattccacccttgtaacccttaggctgtattgaaaggcagtgggtagatggtagtgccttttgaccaagtttgggaagataattggcttagttttgagcaccttttttttttcttttttttaagagattggatcttactctgttgcacaggctggagtatatgttgtgatgatggctcactgtaatttatccttcagacattcggagccttccagggatgttgagcaagggaatgagacgatgagattttgttttgggaactcctgggctcaattgatcctcccacctcagcctccctagtagctaggactacaggagtgcaccaccatgcccggctaactttttgctttttaattttttgtagagatgggtctcactgtgttgcccaggctgttctcgaactcctggcctcaagcaagcctcccaccttgcctttcaaagtgcagggattacaggcatgagtcaccgtgcctggccctgagctccttatctttaaaattgttgtaggacatcaggtggagcttttcagcactctgtgggacatcaggtggagctatgggaggacagaatcaaatggggaggaagaaaagaaaaattcctggagaatgccaccacttgaaagttaggtgacagaagaaaagccaggacgaagattgagcaggagcagtaagagataaaggaagccaaaagggttgatgggagagttaaaagcttgaatggtcagcttaacctaggatgagaattattttttgaaacaaggaaagcttgaaaggataagaaaataggatgtgagggtgatctggctgcgatatctgtcaccccattgattgccagggttgattcggctgatctggctggctaagctggtgtctttctgtcctcaccacttcgtgtgtgtctctcccaaagctgcatgcttggtcgaagaggacgaccatccccaatagaggaggactgatcttccgtcaagagtatacgagtagctgcgctcccctgctagaacctccaaacaagcgctcaaggacatgaaaatagataaggaagtagaatgaagaataaagagggaagttcattttttgaggcaactaagatgatcttttaagatttccagggttgagattagaaaggagactgtggagaagggtgttgggaaagggcaggcagaaggaagctgagaagtaaccacaggattgcctaaatagcacctgggactttctgcactcctgcccccctggagcatatttaacttttctattgctacaaaaaccattccaaacttagcagcataaaacagcaaccattttattgtgctcatgggtttggtgggtgaggaattgagagaggctacagggatctctgcttcaagttgcctggagccactgctgggaagaattaaatagttggggactggaatcagctggagggttttttacttacctgtctggtatctgggctgggaggactcaaggtctgggttcatgggggactcttgacccaggcacccacatatggcctcttggtgtgccttgggctcctcccagtgtggccactggtttccaagagggagcttcccaagagagcagctagagagtgaatgtttcaaaagatgaaagcataagctgcatgacctttcaggaccttaccttagaagtcacatgacatcatttgcaccatactttgttggttgtagtcctcacagtcccccactgagactcaaggggaggaaacaaagaccctccacctctgtttggggagtgtcaaggtcacattacagaaaagtgtgtgggatagaagtcactgttgtgaccttcttttaaaaatataatctgctccggagcccaagtggaaagagtactgggaggcatcctttagactgcaggcttactggttgggtgtaacagaagcagatagagttggtggagggatgacggcaaaagtgattggattccaggctgggtagagaagggcatgtgaatccacaggaaaggtcatcacttggattgagggaggctggagtggaggttaggatgaagatgaagaatagggtaaaaatgtgggatgtagagaggaaggactccagtggagcccagtgcttgctttcacctgttacttggggaatcacaggttacaggttttgtctgtagttattttaaatacacagatgacatctttgtcttcaacccagtaatacaacagaattatttaagggaccaaattgagtgtgtgtttaaaagggaagagggaagcgttgttcgtttctcacccgacgctgccctaagttcacgtcccacttttacatagatggagaagcagctcagagtgtactgtttccagctctagtactgtgacctttaatatacctttggttgccattccgagctggatcagtgtgactccagagcctgaccaccttctgttatgtcacactgcctcctggttcctggttcccccagatgacaaaccaccaaatgaaaaagaactttgatgattaatttccattcctcccctggaacccctttggggtcattcctgaagagctgggtttggtgccaagccagaataggcacagacactcccatggtagggctcctttcttgtgagggaagctgagagtcttccagatcacaaactgcagatggcaaggggaatgttcctttactccctctctgctgtccctgctgggacagaggagcctgtcattgcctcagctggtcttgctgctgcatgtaaaatctttcattcatctcttgtattacctactctgacctcaggctagattgttttcatgttcctaaagccccaattgtcttatccttagcctcatgatttatagaactccagcttaaggcagaacaaagactttggaactgagcagttctgcctcttcccacatgtccactgcctactagtgtgatgtgatcttgggcaagttacttcacctctctgagccatagcatcctcacccatcaaatacagtaatgtctgcagtgagggttgtgcagatagcaggtgtccctcccctctttgtctgattcagtattggcagggacagcttttgcttccttccctgagagcaaggttctttagattcgtgtcacccaacccatcttcctcctcctcagattacctctataaaccagccccctcatcctgtgcacaagtctcacatgaagaaacattcactttcctttccagggtttatcctcaagcctggaaaatccccctcaaatactgtagaatcatctatactgaacagaatttagagtacattgtcacccatcttgcatgccatatttgccacatgacttttggtgtgtgaatgtgtgtggggtattgaggggtattgccttattttaatgctagtttacatttgcagtatatatgagtaggttctagagaagtatatttaagtcctctgaattatgttggtgatttacatacttcataaattccgagagtaaggagagactcagaatgcatactcaatggcgcagtctcctctcaagcatacttggctttggttacactctgcttgaaccctcccaagacactacctcataagacagtccattctgcagcagctgtcattgttacagcattcttccttgggatgcaactaaatatttctacccagaacttctctccattgagtctaatgacagatggctaaagatgtctttcagaaccaccaccatccccaacttattttgtacagtttaaaattaaaagcaccctaacttctcttttggaaatggtgccagcatgtctagaccccttccaggttcattgtggtcatagagggaacttgttctgcaggactccacagatagcaagcactctgctaccttggagcctctagtcgcattcccagcccagtgggacctgctattaagggactgattgttgagctcattagcgttggcacatacatttatttatatttctgaggcagagtcttgctctttcacccaggctggattacagtggcatgatcatggctcactgtagcctcaacctcccaggctcaagtgatcctcgacctcagcttcccaagtagctggggctgtaggtgctcaccaccacgcccagctaatgtttgtattttttgtagagacaaggtttcactctgttgcccacgctggtctcaaactcctgggctcaaggagcccacttgcctctgcctcccaaagtgcagagggattacaggcgtgagccactgctccctggccagcagatgtatttattaattattaaaagattgctttaactttgctggtagtctagctgccttgtaggatagcagctgtcacacccttctcttagagttgcgtgtgtggtggtgtgactcatgcaagcagcaagtcttccacggggcccagccatgagctggcaccatcagaaggctttagagaaggcgggggttggtgaggcttgtataaagtaggaaaggtaggagatcaaagcaaagcccgttcctggctttttagtcttcgtgttcatgtgtgcttttttaaaaatagcttagaaaaattttcatagtttttatgtaaggttttagaacattgggcaagatcccagttcttttttgtggcactaaaatgatagaactgaggcctgctgaaggtacaggttctgtttcattttgctccttctcttagacccctgacctggagcagctggagccgtctttggaagatgtggaaagcatgaatgattttgatcccttgttttcagaggaaacacctggagtggagaagccggtcaccactgttcaggtttgacttctacagcccagaacatgcttattctttgaaggtgttgacctaaatggctgggctagtctgtttctttaggacttaaaactgttatgttttttagaaaattgggtaccaatacttaaaacatctgaaatcagggatttttttcccccggtgattgatcgattggttctagtaccaagatctgtgaatctctgagaaacagtccacccggcagaaacatttggtaaagtaattgggaacttgagatctgaatactggcttgtaatagtttcatttacatttaagccaatgccagtacacataatcctctttggaatctatgtttctgtcattacaatgccaaccagataaactgtcctgagtctgagacccacctgggagagagcttccttgccgtgcagggatagggcactaagcaaggcactgagcaggagacttgtcctctagactcggccttttactgctgctctccacaaagcctctccctgcaactcggggaccatttcatgatggaaacatgtacatgtttataatacacaggttggaagaaggtaggaaattgaattagcaggtcaagagagttgggagaagctatactggcattaacaagggacagaaactattgggattaagaaacgcagtttgaggaaactagcaactggaatgtttgtcatttggcctaaaaatatcttttaaaccttgggtttttaaagcccgtgtttaacttggcagcatatcatcagctatttgttgggacagaaagaattcgagctccagagattattttccagccatctctcataggagaagaacaggctgggattgcagagactcttcagtacattctggacaggtgagacagcgaatctgcttttccttctatcttcctgaaccatttccttggattttgcattgaatggtagatttgatggtcaggcacttgaaaatgcatctcactctcttcttttcattgacttgctgtgctcagatagtattcccttcatctcttatcaccaggcctggcacgtaactggggctctgtagttgttttctgaacctgtaaatgctgggttgactgagtagctttaagagtgtcttttaagtttgaacaacccgataacatgtacactggtttccatgtaaaccttcacattattaaagactagtgattttaaatcaccctaaaaatattgcagagctaataaaatttttttcccctccttgcaggcattttacttatttaagagttacatttccataagaatccaggtgttttacccatttatgcgggcattttcctgcagtgtgaatttgataattcaagttgggcaagtagagaatggaattttgtaggactctggctgctgttggtcataacggcagggaaacttgtacctagcaaggaagaaaaagctgttgctgctactttgtttgagtggctttgagctttgtcttgacagtggttggaaagtgatcaaacatgtcttagataaagctgttattaaaaaagataaaaagaaagcacaggtcgatagatgggccctcaaaagggaggcatggcttttggggataatggaaatgttttgtgtcttaattgtagtgatggttactggaatgtataaattagttagactttatcaaaatgtatgtaaatttatcctcaagtttattttttaaatgtattataaaagtataaaaattctaatcatgttaaggaaataagttgaccattcagattacggttttgtctggctgtttggaaacattgggctggcgttttgtagagacacaaatgaaaaatgaaagttttgattttttttttttttagctttttgtgtagaagtttttctgttttgtactgagagcttacatttctgcatccacatttcgttctgatatttgagttaagggactatattaggagttgtttctttcctaggtacccaaaggacattcaggaaatgctggttcagaacgttttcctcactggcggcaacacgatgtatcctggcatgaaagccagaatggagaaggaactgttggagatgagacccttccggtcttcttttcaggtactgattgttcgagtagtcaattattttgaaaatagcattacctgttttctgattgcaaaagtaataatcatgcagaaatatccactgttaacatttttgtggcttttcttctggtcttaagtccatgcttaatttttaaagcaaaatgggaatcatgttttatatactgttttgtggtttctttaaattggaagatgaagacatgcgtagaattctaagagtgtgaaagagtgtacatcaaaaataagtcattctcctacccagtccgggcccctgtagacattgtggggcatgggatacattggagcgttccagacagaaggactagcatgagcaagggcacaggggccagaagcttgttgagggagtgagaagtggctgagtgttgctggagcacatggctgataaagaggagaggaggtgggtaacgtagagaggtcagcagagcccacactgcagagcctgtgcatcctgctaagaagcttggccttggtctgctctgctttgctgcatgatgtcgtgtacattcaggggggcgtctctgggctttggtgctgactccatcatcaccattactgaattgtgctaagctttggctgtctcagtggtaggaagggggtaatcggtacctgttgctgggattcagtgtactggtgcctgtcaagcgcccgacagtgggcctgcatgtaataaactctcagacatgagctgttgtgttgagggtccctaagaccattccaggcaggatgattctctgggaggattcacaggactcagcttgtaatcctacttacagctgtgacttactacagcaactcagcagagagacaaggtgcccggggtgaaatctgggagcaaccaggtgtaagcatccgaggcctctccctgtggagtcacacaagacataatttccccagcagtgccttgtaaaagcacattaagtgttgccaaccagggaagcttgtaggagacgcagtgtctagggtttttatttgggggctgatcacataggcaccccctgcttggagcatacccaaattccaggctcacagaagggaagcacgtgtttggcataaaccacattatttgtgtgaatgggcttattgagccattcttatcaggtggtggtaggaaccctcccaatatccaagttcccagatgcctaccaaggccccacccttgtaagtatgcctttctaaggtaacagtagggtggtcctgttaactcttttctgcacagctcttatttttaggccatagtgatgaaccatgaaggagtctaagcagggaatgtgatctgatttacatttagtaagatatatttgacactgttgtgcaaaatagagtattaagagaaatattggaagcagaccagttaggaggcagcttcccagcctctaggaggaagtcctcactccactcaccaggatttacagggtctcttgtgttctgaccttaagaactgtccagggttctctcatcattcccccttccacccgctcgtcagccacagctaaccactattagttttccagagttttcctgcctcagggcctttgtacatgctggctccctttgcatagaatactctttctcctcatccagctttctcagtggctggtttcctggaaatcacttcctccaggaagccttccctgtctttccctatgttccttacaagatccacctcttgtaagggaagagacagccactgtcttgtgaaaagtgtcccaagcccttggcacagtattacttggtagctctgcaggaaatacaaaagcagtggcagagggagaggaagagagggagttgatgtgaaagaggctaaggcagtcaaattgtcagagcttgatagtaagttggatctggggagggaagtcggacctaagataattcctaaattctaagtggagcaactagtttgctgattaagagattcactgaacgaggagccgcgggagggaggacaggcttaagggagaggatagtacgttccatttccagggtgggttgagtttccagtggacacacgaaaaggtggccacagctagctggatgagcgctcggtgggtaagggggaaagcaagagggtagtttcacaccctcccacctgccacaaacataaaatgtgctctgggcactctttgggagggtagtgatgttaaggatgaacccctaaagaacactagcatttaagggctgtaggacacccatgagtctaagaaggaggtggaggaagaggagtggggagcaggagagagcagcagtgctgaagccagggggtgacagtaaggggcatgagcatggggctgggtcacgctggcagcggcgacttaggatgaagtagtagagaaaaaaatcgtagaggattttcaagatctatttcttggtaatttccaaagtctcccatgaattactctgtgagcattggttgtggaatgctgctaccagccagatcttttcccagccctgcttttgctgttatggtgtcacctggcctagcctcagctcccccctcccctcctgtttctgccccctttcacattgctaatgtaatgagtgtgtcacactgtcactaagccctaatgttccaattttagattatgtattcagcagtggctcaaacataccaaccacctaaggccctccgtgatcattagaaggaagagaaccccaagatgtgcaaatttacaactttaagttcctgttttttcttaaacagtaaaacatttttaaatattacaaaaatatcagacaatttaaaccaaaatgaaaaccaagaaaactgtagtttcagcctctgcgagcaatgttctttgtatactttccagtcgttttcatctcatgtatggttttaaccaaaaagagattggtgatagcttattttgtaacctgtatttttttcactttcaaattattatgacaatttttttatatcaataggtacatttccagagcatcctttttatggctgtatagtctattaaccatatgtcttgctgcattttttattagtaatgatgacagctatgctttattgaatactctgtaccaggcagcatctaccatgtgccttacactcatgcacttaaatcccctgaagccagggggtggggcctctggttatcctagtgacaaggtcctcattcacaggccccttgcccacgtggcaagcccagcagctggactcctgagcctgcactttcccacctccatttgtgcatgttgattccactgttatggcctctgcccttcagtcccgaaagttctgaaatcaccattctaacctggaactcatgggattggtggagtggggaggtgagagggaggtaggaagtgaggcgggtaactccagaacacaggaggcccgatggaagctgcagtgttaccataatgatcagatcagcctagccgagggccttctcagagctgctgaaccccagcccaactccagtgagaagcaggggaaactaagtgctggcagcctcacagagaacgcccaggtcacccctctctgctgccatttctcctgaggctcttttgctaccctggctagagctgccttgcagcggcccctgtttccctctactcagagtggggagcggggccaggaaggccttttccccaggtcacgggccagcctccacttcacctctccctgacagcttgtggttgacagcatcaggcagcaggaggctgagccactggcccctctctgaccccgagtgtcaggtcttatgttagtaaaatgtctgacagccgtctgttctggagagtctgggcattccagctcacctttgtttacagggtgtggagctagccccgaactgtcttggagtgcactgggcccacctatgtgtatatttctggggataaaatatcgggggctgtagctgagccaggtcaacattcactcctggagccctggtggaggtgtcctggtgaatctttgtgtttcaggttcaacttgcctcgaaccctgtgctggatgcctggtacggtgctcgtgactgggccttgaaccacctagatgataatgaagtttggatcaccaggaaagagtatgaagaaaagggaggagagtacctcaaggagcactgtgcttccaacatctatgtccccatccgcctgccgaagcaggcctcccgctcctcagatgcccaggcatccagcaagggctccgctgctggtggaggtggtgctggtgagcaggcatagcagaggccctccagagagactgccctgcacgccatgccttgggccacgttggcagtgtgacaggactgtgattgtgctagatgtacctgcccaagtctgctggtcacatttggcagcaaaatggatttctcctggggagaacaaagttaagggacactgagacctgcccttcagaattcggttcacttgggggcttctgtggtagagactaactggccttctgatgtctttgttcaactgtggccagctgtggcatcagcttcctggagcagtaaatgaagacagagtggaggacacaaatgtacaaaatgcacaagactgatttcttaccacattttagtctttcttgttttaaaaaaaattctttaaaatttatcttgtccgtgtagatactttattcttctggatgtattcagaaattgcatgaatgcccagtgaggggaggtctttcatgcatataaaaaggtaatgtttattgccgggcacagtggcacgtgcctgttaaggcccagctttgtgggaggctaaggcaggaggatcgctggagcttaggagttcgaggctatcgtgtgctgtgatcgcacctgtgaataaccactgcactccagcctgggcaacataggaagacattgtctctaaaaagatacatttttcataaaaggtaatgtttattcaataaaagcagttgcctcaggaaccggaaatatttccctcctcctattttttccccttacagataaggagaaaagcccagaaagttaccagcatgtgaggtcactctgcaagccagggacttgcttggtgccagagccagtggcccaactttgttcatactttctctgctgtaaacttttccaccatacaaggcctacaaatgttttatttctgtccttctgagtttgttggcttcttaactttttcagactttttggaagaaagataagactggaggaggtttatcctgtagcctgttcagttttgccataacctcccattccctgtaccttcccagctgtgtcttaagtggacagataacccctcaccttcacagagattgctcggtgagaattttaactcaaagacaaccaattattgatcccagaaggcccctgagctaatattgtcactgaatttgtacctttaaatcttatggagcctctagcccacccctctgatgaggccaccttagaacctgtttgctcatacagtctaccaagggtcatcacctggatctccagctctcaagggcttagaaactgcagaccggaagggaaggggcagtggtgatggagagagtggaagaccacagctgaccgtaaacaaaggaaaaaggaaaggttatcgcaaacctaaatagaagatgcacagggggaagatactccattgaaaagaaatgaaataagaaagtaatagataaggaaaagaggcaaaggaaattaaactgtagttgaagaagaaaatttaactatattgagttttgtggtggtgatggtcaaaacaacatgacaaactttaccatcttaaccatttttttttttttcccgagacagagcctcactgtgtcgcccaggctggagtgcagcggtgcaatctcagctcactgcaacctccgcctcccgggttcaagcaattctcctgcctcagcctcccgagtagctgggactacaggtctgtgccaccaagcccagctaattttttgtatttttagtagagatggggtttccactgtgttagccaggatggtcttgatctcctgacctcatgatccacccgcctcagcctcccaaagtgctgggattgcaggcatgagccactgcgccgggcccatcttaaccgtttttaagcgtccagaacaggggtgttaactctgtgcacattgttggtcaaaagatctccagaactttttcatcttgtaaaaccacactcaatacccatcaactcccttccccctgcctctgtccatcccctgctctttgcaaccaccattctactttgtaagagtttttctttagataactcacataagagaagccatacagtatttgttgttttgtaactggcctatttcacttagcataatgtcctcaggcttcctccatgttgtggcatgtgtcagaatttccttcccttttaaggctgaataacattccatcatatggatataccacattttctttctttaccttcgatggacatttaggctgcttccatttcttggctattgcaggcaatgctgcaattaacatgggagtgcagatatctcttcaggatcctcatttcaatccctttggatatatacccagaagtgggactgctggatcatatggtagttctatttttaattttttgtggaacactcgtactgttttccatagcagctgcaccattttcattcccaccatcagtgcatgagagttccagttcctccacatcttcaccaactcattatgctgtttttttttttttgatagtttcctcatttactatctttcatctttttgataataaccattctaactggggtaaggtgatatttcattgtggttttgatttgcatttccgtgatgattagtgatgtggagcatctctctgtttgcttattggccatttgcatgccttctttagagaagtctctattcatgtcattagccccttttttaattgggttatttcattttttgttgagtataggagttctttatatactctggatattaacctcttattagatacatggtttgcaaatattttctcccattctgtaggttaccttttcactcttgtttcctttaatgggcagaagttaagtttgatatggtctcatttgcctgcttttgctttcattgtctgtttttggtgtcatatccaagaaatcattgccaaattcagtgtcgtgatgctttttcccggagttttcttctaggagtttttcaggtcttatatttaggttttatcaactacattacgttttatgttgaagaaaaaacactggaatagaattaatgtttaaactgataataaaattttcttcccccacaaaacaaaccaccctgaatataaatactgtaaggccactctgtgtgcttgggaaagttgactcagaggtgtcagatcctagtgaaacgattagattttaaagataaaagaagtcctctcgggccaggagtggtggctcatgcctgtgatcccagcactttgggaggctgaggcaggcagatcacttgaggccaggagtttgagaccagcctggccaacatggcaaagccccatctctactaaaaatacaaaacttagctgggcttggtggtgcacacttgtaatcccagctacttgggaggctgagccatgagaattgcttgaacccaagaggccagggttgcagtgagccaagatcgcaccactgcactccagcctgggcaacagagcaagactgtctcaaaaaaaaaaaaagtcttctcagcctccatgcaggcttacacaagaaagggaaattagatggtgtcagactttttaacagcactaatactaggaagttaaataagttgaataattagaaaacaaaaatgataaatttgaagaaggatggcaacatttttaaactactagaaaacctaattaatgtagaaagcacaaatgcatgtaataaataaggtactagtcatcaaaagaagaaataggttgggctcagtgacacacacctgtaatcctagcgctttgggaggccgaggcaggaagatcacttgagtctgggagtttgagaccagcctggacaacatagggagactccacctgtacaaaaaaatttaaaaatcagctgggtgtggtgttgcatgtctgtggttccagctgctcaggaggctgaggtgggaggattgctgcagtgagccataaatgtgtcactgcactccagcccggccaacaaagtgagaccctgtctcaaataaataatcatctatttttcacacactctggaaatacgtgagaaaatctagctgcaattgtcaattttctgcattcaagcctttaattttaaaaaagtgaattttctaggaaaataattcaccaaaactgaccttaacagagatatataaagttcaaacagacttttttttttttccatagatgaactcaagaaaattgccacagagctgcccccctccctccaaaaaactccaggtccagttgagtttaatagctattagccttaaacactagatacttccagtgttccttaaactttaccagagcataggaaaaaaaaattaaatgatttttatgtagtgagtataatgttgctatcaaaatccagtaggttgtacacacacacacaaaacaatcttgcttaaaaatatcaatggagaaaacaaattatttgcaattgaaatccaccaacacgttaaaaaataacatcatggccgggtgcagtggctcatgcctgtaatcccagcactttggcaggcccaggctggcaaatcacgaggtccagagatcaagaccatcctggccaacatggtgaaaccccgtctctactaaaaatacaaaaattagctgggcgtgatggcacatgcctgtagtcccagctgcttgggaggctgaggcaggagaattgcttgaacccggaaggcggaggttgcagtgagctgagatcgcaccactgcactgcagcctggcgacagagcaagacgctgtctcaaaacaaaacgaaacaaacaaaaacatcgcgaccaaatgggttttattccaggaaatgcaaatgtatgtgtcaaacaccaaaatctcagtggcttaacaccaagtatatttcttatgctgcatgttcagtaaataccagtatggtggagtgtggggagggggtgatgcattgctgtggataattaattactccacaccatcttatgatccttccttctcaacgcaaagcaaggaaagagaacatcaagcgttaagtcctggctcccaaatgtgccacccagaacatatccaccacgagtactcaaatttcactggccaaagcaggtcatttagccatgtttaatttcttagtatttcatttttagttatttagtatttctatttatttatgactgtatgcccttgtgtgtgtgtgtgtgtgtgtgtgtgtgtgtgtgtatggtggtggttctaggaattacaatatatatccttaaaatattacactctggggggtcgcaggcaaaaaaaaattacagtctgccattaattaattctacaatacttcacatacaatgtcagaatgctaccataacagtataactctgtttcccctcggttggtcttttgtggtattgtcatgtattttatctactattatgttgtgaatcccataacagtatgaattttttttatgtagtagtcttctagagaaatgtaaaaagatggtcttggttgggtgtggtggctcacccctgtgatcccagcactttgggaggccaagatgagaggactgcttgagctcaggagttcaagaccaacctgggtaacatagcaagaccctgtctctattaaaaaacaaacaaatgcctggcgtggtggctcatgcctgtaatcccagcactttgggaggctgaggcgggcggatcatgaggtcaagaaatcaagaccatcctggccaacatggtgaaaccccatctctactaaaaatacaaaaattagctgagtgtggtggcacatgcctatagtcccagctactgaggaggctgagacaggagaatctcttgaacccaggaggtggaggttgcagtgagccgagatcgtgtcactgcactccagcctggtgacggagcgagactccatctaaaaaaaaaaaaaaaaaaaaaaaaaaaaaaacaaactcttagctgatggtggtggtgcacgcctgtagtcccagctactcgggaggctgaagcgggagaattgcttgaacctgggaggtcaaggctgcagtgagccatgattgcgccactgcactccagcctgggtgacagaggagcaagaccctgtctcaaaaaaaaaaaaagaaaaaaaaagatggtcttcagcactaacctgcaagttggccctttccagtacaggagagtagggatggagggaggtcatttccttgacgctagtctctcagcttggacattcctctgaggaatgcttaacaggatgagggagggggcttcgcctctggccagtgcccagcttaagtagccttttggaaaagttccagaggacatggagtggggtggggttctgcaggcagccattcctcagtctacacaaccctctggttccacaagaattgggagatgaatttggctgcctgcacttcccagcctgcatcagttttttaaatttttatttatttattttttttttagatggagtctcgctctgtcacctaggctggagtgcagtggtgtgatcttggctcactgcaacctctacctcctgggttcaagcgattctcctgcctcagcctcccgagtagcttggactacaggcgtgtgccaccatgcctggctagttttttgtatttttagtagagacggagtttcaccatgttagccaggatggtcttgatctcctgacctcgtgatccacctgcctcagcctcccaaagtgctgggattacaggcgtgagccaccgcgcccggcctgcatcaggttttgatgagcacgtggccaggagtagggtagtgctgtccagccgatcccctgcccggggaacctcctgtggattgcctggcattgaggttgatcgtatgccctagccaggacaaatttctggaaacccttttgctttagtcatgggggcagggctttacccactgatactccccagcttgcaatgcttcagcaataatctggactgggtttcatcacaagtggtgttaagtctccaaggctttacatttggactattaataaccgtgccctggttatcaatagaaaggggcactccaagagtgtgaactaggtcctcgtgttgatggtgattctgccagcctttgctacaggcattcctttagccattcagagaagatacactcaaatgctacagtatactctaagatatgaataaaatggaccaggatattttcagaaggccccaaaggagaggatgacttgccctcattttcttgacaacttttctcacatctgggcctgtgcaataagaaagctcttacaaaactgctgagacacactgggaaatccagggtataccgatcacatccagccagttctggcactccttggtgtgtgccaagctaggggctatgggaacagggtgagtgggtagatcctttgatgccactccaaagctttctggggagcaccaaaatgacaggaatgcaaaatctctgaaggctcttttctgaattccaagctgactctgcagaagggccaaacttaaagaagcggcccaggctgagcgcagtggctcacacctgtaatcctagcactttgggaggctgaggtgggtggatcgtctgaggtcaggagttcgagaccagcctgatcaacatggtgaaatcccatctctactaaaaaatacaaaaattagccgggcatggtggtgggtgcctgtaattccagctactttggaggctgaggcaggagaatcgcttgaacctgcgggggaggaggttgcagcgagctgagatcacgttacttcactccagcccgtttataagagcgaaactccgtcttgggaggcggggggggggggcatgtgggaagaagccacccgaggagcctggtagggtgatgaaagtgagagcagaggtgtagctcagggccgtgcagcacctcggctttggctctttgcaggctgtagaagcagaatcgtaagacttctcctggcttgtttctttccatttctcgatttgactcctcagcctgctcttctggctccctgctgtctaatggaattccagagcttgaccttgagaatgcagattctcccgattgacaacttctagagaagggaatctcagaaagacaaaggagatgttccttcttccgctgcaagagtggaaaagcagacactctcctgagagcctcataaagctggtgaaagcctgttctgataaagcacccaggagatcattccttccgccccctgctcccaggacaggcacttaggtgagaatgtgtgactcatccagttctgatacctgctgcaaatggtatatgaaacaaaggaatcttttaagccacctgggcttcaaagaaatgtaactgtgtacttttttttttttaatctgcttttaaattggtaaccttgcttaattgcatgttgccctggtaataaccttgcaattgacatctctttttaaaaaatgaaggtctacaatgtctgtattggccagaagagctttgcaagtttctttgttcatctttctcctatgactatgattttcttcgaacaaagagtttgagaggccttgcttcgttttaaattaacaatacatactttgcatatttgacttgagaattgtgtgtatgttatacactactacaaaacaaaccaatttcaataaaaataaaagcacaatccttaaaatcaaagcaaagtgaaacaattgaacctcattatatatcaagttggtggtttactcacacggagaggacttattttaagtgactttaattaggtgactttattttaagtgactttccatggtagttggaaaaaaagaaaccacagtagttgaatgtatatctttagtgggatatattctaagaacaaaaaataaccgcacagtaagaaatcttactgttttcagtaattatgttgttagtaatggcattggtatgattattctgaagatataaatatgtgtgtatatattcaaataatgttaacattgttagcaaccaagattttcagtataacaagatataaaaatataaaataaaaactgaaaaatcatataatcctaaatttgaattgcacgtatccatatgaacacatgatgtattttctctttacaaatattaattaattagcctagaacaacaaacagccaatcaaacaggcaaatcacctgaggtcaggagttcaaaaccagtctgaccaacacagtgaaaccctgtctctactaaaaatacaaaaaattagccaggcgtggtagcaggcgcctgtaatcccagctgctagggagactgaggcaggagaatcgcttgaacctgggaggcagaggttgcggtgagccgagattacaccactacactccagtctaggcgacagagtgagactccatctcaaaaaaaacaaacaacaacaaaacaacaatgacaacaacaataaaaccctcaaaattcaggagtccacttgaaggggctcccgctggcccaggaatgggacaatttgagcatctgaaaaaataacagtgaaaggttgaaacatactaaaatctatgaattcatcatggtcacctttggagaatgctagggaaccagttcatcattctgaaactaggaaataaagggcaaaagcaggcatagatctcacctttcttgtagaaactgtacctcatggcaaccgaacagataataagggaatgtttttctttgtagaggatttctagctaaacaaatgaaaacagaatgatgaaatacctaccaccattttctctttctttcttttttttttttttgagacgcagtctggctctgtcatccagggtggagtgcaatggtgtgatcttggctcactgcagcctctgcctcccgaataccaccattttctagctcctaatgaaataaaggcaagagacaaattcttcatcaatgacagctaaaaaccactcggtgaagagttgatggaaggctgggcacagtggctcatgcctataatcccagcactttaggaggccgaggcaggtggatcacctgaggtcaggagttcgtgaacagcctgccaacatggtgaaaccccgtctatgaaaatacaaaaattagctaggcgtggtggcacaccccagtagtcccagctacttgggaggctgaggcaggagaatcacttggaagttgcagtgagccgagatcgtaccactgcactccagcctgggtgacagacagagttggtctcaaacaaaaaaaaaaaaaaaagaaaagaaagaaaaagagttgatggacatctttataatggatggatattatgtgcctcctggtgtgatacaatacgacatactgcacatcatccatgaagaattcttaggaaaaaatttgaacctgaatgtgatcaagccactaaatttaactgccattttactagaaattctggggacagagaaacatattatgaattagcatcccaacaggaagcagatgggatactcaggttaggagaatgagatgtgaaggcagggtgtaaagatggtgcagggtcctgggaaggtcctcagagaagcctttacaataggaaaggagaggctacccaaatttggaaggagaaagagttgtatagaacagttgtgttgagagggacacagcttcagtcaagaagcacagccaaaccaaggtggccttgccaggagggagacagggaaatacacgccccaactgcattgtcctccctccctcccacacctgccagggctccctattggccaaacccatctgaagccagagggcaagagagcgcagctgatgtaattcacacatggcagtctccaagggcaaattcaaaggtcagagtggagaagggtagttgctaaatgggacaaacgagtacagtctgtcacaaacatgataaataacaccacagggctgcaaacagcaaaatccagaatgcagaaaactctccaggacaaatagcattttccccccaccaaacaaattgcaaagggggaaaagagagggagaagatataaattaaaagaaaatttaggccagtgcggtggttcacgcctgtaatcccaacactttgggaggcgaaggtgggcggatcgcttgagggcagaagtttgagaccaacctggacaacgtggtgaaaccctgtctctaccaaaacatacaaaaaaaaaaaaaaaacaaaaaacaaaactagccaatcgtgatgatgcacacctgtagtcccagctactcaggaggatcagatgggtgggtcgcttgaacctggaaggcagaggttgcagtgagccgagatcatgccactgcactccagcatgggtgacagatcaagacttggccttaaaaaaagagagagagagagagagaaaagaaaaaagaaaatttaaaagcataacaaaaatataaagtgtggaccttgtttggttcctaattctaataagccatgtttgataaaagaaacttctgagcaaatctggcaaatgtggatatttaataatatgaaagaattattgatagtttttaaagatgtggttgtgatttttgtagttttatggagggagagagagtgagtgagcttgtcttatagagatgcatattgaaatgttggcagctggagtcatatttgggatttgctccaaaataggcaaaggcttatagataaaacaagagtgagtgaccgtgtgttgattgtcactgaatatgggggaataggtacacaggggctggttatacttctctgtttttgtgtgtgtttaaaattttccattaaaaaaattaaaaagttgagccaggcacagtgactcatgcctataatcccagcactttgggaggctgaggtgggaggatcccttgagcccaggagtttgagactagcctgggcaatgtagcaaggcccctgtctctacaaaagcaaaaaaaattagtgaggcatggtgacccagctactccggaagctgaggtgggaagattacttgagcctgggagatccaggctgcagtgagcagtgattgtgccactgccctttggcctgggttgcagtgagactgtctcaaaaaataagataaaaagtaatgacactcttgtctagccttgttttgtttatcatatagcaatatttcttggatatcactcagtagcagtgcgtagtgagctgctgcttaaaaaacaaacaaacaaacaaaaacccaggagtctcactattgtttcacaggctggtctcaaactcctgggctcaagcgatcctctcacctcggcctcctgagtagctgggattacaggtggggatgcttcttccttgtctctttataatgtatgtctgtataaattatatgtgtcacaaacacgataacgccatggacatgcaatcagcatatctatgacatatacatataaattttactcaaacggtagcatactatggcttaacaatatgtcttgaagatcactccatgtcaatacaaaccaagcttctgcttttttcccttatcttaatattatttttcatggataatgcattgaaaatctactctccaaccttggctcttctttttttttttttggagatggagtctcactctgtcacctaagctggagtgcagtggcacaatcttggctccctgcaaccttcacctcccaggttcaagcgattctcctgtctcagcctcctgagtagctgggattacaggtgcccactaccatgcccagctaatttttaaatttttttttagtagagatggagtttcaccatgttggccaggctggtctcgatctcttgacctcaagtgatccacctgcctcagcctcccaaagggctgggttttcagatgtgagccactgcgcccggcctccttggctcttttctcttaagaaacggatgagaattgcaaacattttcctatgatggtatttgtcttttaactttgttggggtgtttttccactcagattcttttcgtggacttaaattgcttttgggttttatgtcatactttaaaaggcctcactcactttgagataacaaaaaaaaaatcctacgttttcttttcacatatgtggttttttaaaaatcctttttgggctgggcacggtggctcacgcctgtaatcccagcactttgggaggccgaggcgggcagatcccttgaggtgaggagttcgagaccagcctggtcaatatagtgaaacctcgtctctattaaaaatacaaaaattagccaggtgtgctggcgcgggcctgtagtcccagatatttgggaggctgaggcagaagaatcgcttgaacccgggaggtggaggttgcagtgagccaagatcatgccactgtactctggcctgggtgacagagcaagattccatctcaaaaaaaaaaaatcctttttggtaatacatacacacatataatgatataaaacataaatgtacacccaaacaactgtggctaaatgaacacctgcatgaccaccaccctctgtggtcaagaaatagaatactgctgccaccctagaagcctccagtatgatccatcttccctcattaaaatccactccttcctccttagaagagaccattgtactgatgtcagtggtattctatttcatgttccttatcatgttgctacctcattatgcatccctaaacattattctgttgttgttgttttgagacagagtcttactctgtcagccaggctggagtgcagtggtacaatcatgagtttgaggctcactacagcctcaaactcctggactcaagtgatcctcctaccttagccttctgagtggccagggctgcaggcatgtgccatcatgcccagctaattattttattttttgtagagacaggggcctccttttattacctaggttggtctcaaattcttgggctcaagcaaccctcctgtcttggcctcccaaagctctgggattataggcatgagccactgaacctagcccctaaacattgttttttgtttgtttgtttgtttgtttttgagacggagtctcactctgttgctcagactggagtgcagtgatgcaatctctgcaacgtctgcctctcgggttcaagtgattctcctgtctcagtctcccaagtagctgggattacatgggcatgccaccatgcgcagctaatttttgtgtttttgtgtgtgtgtgtgtgcagatagggtttcaccatgttggccaggctggtctcgaactcctgacctaaggtgatccacccacctcggcctcccaaagtgctgggattagaggtgtgagccactgcacccggccaacattgtttttaagatccattcatgttgtgtgtagctgtggttcattttcattgctttgtagtattttattgtatgcatgtaccataatttatttatccagttggaatttatcctggcaaagatttgcagtaagtctccagctgaatttcttttcaggcgactagccagttgcaccaacaatatttagtgagtaatccgtcttttctccactaatgtaaatgccacttttattatttattaaatgaccttaaatattgtggtctacttccagacttgctcttctgctccattcatctttctatttctgaatttgcaatgaacagtttattattgtcactttataatacactttaagatctggcagagtttgtctcccgcatttctctttctttttcagaacttttcttgatttccctgcatgatctttggaatcagcttgtcaagatccaaaataatcctgttggtatgtttgtttgtatcccattaaaattatagatgaaaagatagaaagatggtatcttttcttcaattgactcctctagccaaaaatggatatgactttttcctttattcaagtctcatggcacataatagcctttgaaagttttagtcatatagttcctgtacattccttgtgaagtaactcattcatttaaacatttgaatagtattctattatatttcattccatggtttatttaatcattctatctttgaatggcatttgaataaatctgtttccaagtttattctgttacatatagcactgcaaagagtatccctgcaaaaatatgtatttggaaatgatgttactataaatgaagttgatggaccaaaggattttaaaaatataaaataataagataataaaggtcatgctaatataaaaataaacaagaaattaaagaacagtgtgttattggtcaagtgtggtggctcacacctgtaatcccagcactttgggaggctgaggcgggtggatcgcttgaggccaggagtttgagaccagcctggccaacatggtgaaacccgtctgtactaaaaacacaaaaagttagccaggcatggtgacacacacctgtaatcccacctactcaggagtctgaggcacgagaatcacttgaacctgagaggtggagattgcagtcaggtaagatcgcatcactgcactccagcctgggtgacagagcaagactctgtctaaaaatatatatataaaaaatatataaaatatatatatataatatatattatatataaaatatatgtaatatataatataatatatatcatatattatatatatagcatgctatcatgtaaaaaaagaatatgaggataaacaaaatataccaaaataagggtaaaatatgtaatatccttgtattaagtagaggatcatagcaggaaagtaaagtgattattatggtactattactattacactggtcttgactgcaaaatcatttcctgcctgtccccaggctggaggtcagaaatggcaaagctgccaccattaactctgttgaggttctacttcagggctttttttcactgaggtggacacctggaaagcctccactacaggcccatagccaggcaagggaatggaagctgcccgagggctccagctgctcactgagttaacatgtgggaggtggaccacagcaactatgtggggaaaccctgtctgcacactgaatcccagcagaatctagcagagccaagagctgagtaacacagagccccaaggacatcatgtgagaccctggatccagcctcacctgaggatgtttcagagcagagttctctaaggcacaagctacaagtgagcatggctgtaacaggcccaagggggcaccagaactggggagaggggcttggtgcctcaaatattgactgctttgggaacggcaggagtgcttgagcggtggacaccggcagcagcagcgaggcccctctagaagcctaagaagggcgctggagcagaaggggacacacagcaggggattggttatctattgctgcataacacccaccccaaaacttagctgcttaaacaacaactattgtatttgctcaggattctgtggctcagcaattcatgctgggctcagctgggcagttcttctgctggtcatgccagagtcactcatatgtctatagtgatacggaacttaacaggggcaggcagtccaaggtggcctcactcacatgtctggggcatcagctgggattcctggaacaggttgagtggctggattattccgtgcatgtagcctctcatccttaaggagtctactccgactttattcacaaggtgacagtgttcctagagaaccaggccctgtgtatacaagcatcccaagctcctgcctgcctcatgtttgctgatggcccactggccagcgcaagtcacatggacaagccccaagtcagtgtgagagggggctatgcataggcgtggatgtcaggaagtgtggtccattggactccattaatgtcatgacgttgccatgtaatatacaatgcatgcttggccctcagcctatgtctaagctcaggtgagaccttccctgggacagcccaagcataagcaagtgagcctggcaggtgagactagagctggtgcaacctgcattaatgaggggattggtgctttgataggattaaaccaggggctagcatagcacagaggagggggcttaaccaatgccagggctttcagaggccctgtggctagaggtgacaaacacagtctctcaaaccaggcagacctgggttcaagtcttcactctgccatttccttcttctgtggtcctgggctagtaactcccctactctgactgtcagtttcttcatctgtgaaatggacctcacagggttgctgtgagaatcaaaggagctcagaagagcttagcctgacacaaagcagcagtctataaatggtggtgctagtgatcagtgtgataagagtggtgataaacatcatggtccctgacattggtgacaggaggcagggtcatggatgttctggatgagcagagagctctggataggtgactaggagtggcctgttagaggagggcagggaagggcatcccaggcagagagagcggtgcatccaaaggcgtggaggtaggattgagaatgatgtgcatgaccaactgcgacaccatcggtgtgtgcagtgtgcctcgaggacgggtgccatggcagaccgcattttcccaagacagatatcgcctatatatcacatgatcgtctgacaatgtggctgttaggagcagaatcatgttcccacaaatatatacgttgaagtccagtacctcagaatgtgactgcatttggagatagggccttaaaagaggtgattggccggacgcagtggctcacacctgtaatcctagcactttgggaggccgaggaaggcagattgcctgagctcaggagttcgagaccagcctgggcaacacggtgaaaccccatctctactaaaatacaaaagaaattagccgggtgtggtggtgtgtgcctgtagtcacagctactcaggaggctgaggcaggagaatcgcttgaacccaggaggtagaagttgcagtgagccgagatcatgccactgcactccagcctagacaacagagcaagactctgtctcgacaaaaaaaaaaaaaaaaaaaaaaaaagaggtgattaagttaaaatgaatgcgttagggtggggctgtaatccagtatgactgtgttcttataagaagaggagacaccaggcatgtgccacacagaggaagaaccatgtgaggacacagtgagaagacagccatctgcaagcccaggagggggtccttaggagaaaccaactctgcccacaccccatcttggatttcttgcctctacaactctgaggaataaacttctgttgcttaagtcaccctgactgtggtcctttgctatggcagccttagcaaacgaatatattgactttgacatccctcccatcaaagggtgtcctatttctcctctccttgaaactcacacttgagcccaaccgccatgctatgaggaagcccgagctagcccagcagccatgctgtgcctgagctagcctagctgccatgttgttcctgagctagcctagcaaccatactaggaagcccaagctagcccagctgccatgctgtgaggaagcccaggctagcccatgctgtgaggaagcccaggctagcccatgctgtgaggaagcctgagctagccttcacggagagaccacacagagagacccttggtaggggttgcagctgacagccatcatcaatacccagacaggtgaatgaagacacctccggatgattccagctcccagctattgagtcacccccccctccacgtccccacccccagctggtgagtcacccccagccaacaagtatttccacctgaggcccgggacatgtggaaaagacaaactatccctgcttcaccttttccaaatttcagacctacagaattcataagcataatgaaatggttgttttacccctctaagttttggagtagttggatacaaagcaatagcatctcccaagggctcttctagatggagcagctacccacagcctggttctgtttttgacgtaacagcgtagaacgcccctctcccgagcactcccgaactttgagagagacctgatactgccacttggtggccaatagaaactatgcaagacccgctgtttcgccctttcttcttccttaagagtttattcacattcattcattcattccacattcataatccctgatggtggtggatcaagtgtagttttaaaaagcatattcgaaaattactttttttaatatgctttcatctttggtcatgaaatttcatttacaagtctacaatcccttacactcttccaaaatccaaaattctctgcaaactcaaagcgtttgcatcagtttataaaagcttactcagtagctaaatctaatccgaactggcttaaggctatttatagtctttcattaacatttcacagtaagattttttttttaatttttttttttgacggagtctcactctgtcgctcaggctggagtgcaatggcacgatttaggctcactgcaacctccacctcccgggttcaagtgattctcctgcctcagcctccccagtagctgggattacagtcacccgccaccacacccagctaatttttgtatttttagtagagactgggtttcaccatgttggccaggctggtctcaaactcctgacctcaggtgatctgcctgcctcggcctcccaaagtgctgggattacaggtgtgagccaccatgcccagcccacagtagaaataataatatttgatttgggggtgctgctctagacccctctaaggatgtcgtaaaatagcagtagttctcaaagtgtggttctgagaccagctgcattggcatcaaatgggaaatggaaatggaaattctcaggccccacttcagacctacggagtgagtgtggcccagccctctgtgctttaacaagccctcttggagattctgactcacgctcacatatgagagtcactgatatagactctatgcacccaccacattgcatttataaaattcaaaaaattgtgaaattcctaagcacatgtagtcccatgctttatgaaaaaggattgctttcagacctgtattttggaatgtcaagtaatattaagggaagccatgagattttcatgtctaaaaaggggggaaggggccaagcgtgggggctcacgcctgtattcccagcactttgggaggccgaggcgggtggatcacctgaggtcgggagttcaagaccagcctgaccaacatggagaaaccccatctctactaaaaatacaaaattagccagccatggtggcgcatgcctgtaatcccagttactcaggaggctgaggcaggagaattgcttgaacccgggaggaggagcttgcagtgagccgagattgtgccattgcactccagcctgggcaacaagagcaaaactctgcctcaaaaaaaaaaagggggggcagtggggaaggagttccttgtaggaatggagaaagggtgtgattaataacaataaaagctaacttttgctgagttatttataacctatcaggcactgcgccaagtgcctatgcttatctagtccacataatgcacctaggagatagttacttttatcatacccattttatgaatggggaaactgaggcaagtggtgtgagcacctaccaaagcctgaagaaggtcagcagtagaagctgtggccttcagtagagggacacagccaactcacatggcctcacttctgccctcttatctcctacaagaagccagaagacaagggaattcctatggtgtcatccacagtagtgcagagcaagatgaagtatgctactcaggcctccaaatttccctccaaaacaactgcaccagcgtttggttcctcccaccccaatgggttccacttacacagtcttaggtctgtagggctagtgaagacagccagcctatcatttattatgcctctagtgcaaatctgggtatcacaaatgcatgctattgtggttataaaatataaaagtatcagccgggcccagtggctcatgcctgtaatcccagcactttgggaggctgagacgggtggatcacctgaggtcgggagttcgagaccagcctggccaacatggtgaaaccccgtctttactaaaaatacaaaaaaaaaattagctggacatggtggtgggtgcctgtaatcgcagctactcaggaggctgaggcaagagaatcgcttgaacccaggagttgaaggttgcagtgagccgatattgtgcccttgcactccagcctgggcaacaagagtgaaactccatctcaaaagtaaataaataaataaataaatataaaagtatcacactgtaagtgttcatttgcagcttgcattttttcccaactcattttgttttttcagatttatctatgttgatgcaggcagctttatttctgttcattctctctgttgtttagaattctgcgatattaaagcactcctgaatccatttatccattccccctttggtaggcatttaggatgttgctggccttttgcagataaaggcctaatgaatatctttagacatgtcttctacacaggtgggaggttttctcctagctggatgttcctaaatgtggagctgctgtattactggacgcgagtacccaactttcccaaataatgccaaatttccctccaaaacgattgcaccagggtttggttcctcctaccccatggggttccacttacacagtcttagcccaccgcggtattgagagactattttatttatatttattttgcctttccgatggatgtgacctctacctcctatctgttttatttacatttccctgataattcagaaatggagcatctcttcaacccatctgtcatgtggggataaacattttgcctttccacttcaggctttgcctatgtacagttgacccttaggcaacatgggtttgaagtgcacaggttcacttaaacacagttttgtttttgtttttttttcaataaatacagtaggctgcccatatggatgggttctgcatctgcaacccaatgcggatggaagataccatatttgccggaatcctgcaggactcctgaaattttacgcactgattttgggaaccagagtcctctgcagataccgagggatgacatatcttccaagcatagatttctagaatttcaaaagaccttccctctcttattccaggcagtaacacatgaaaagcgcttcggctttcaggctgcctcctgggctgtgggtgttccaggctcaattttgccactcaggcctgaggaacaattttgtttgctgtcgctggcatctgtccttccccagaggcaaagagtgacaatcgcgagatgggtgagagctgagggcaaccacagtagcagcgcaacaaaacaaatgcagaagggaaggaaacctaacccacatttgtaatttccaaaatattgtcttgctgcattttcaagctctgtttattaaagccctgatgtatgccaggagtatatttctctatcctccaaacacttccaccagcctcctaaagcagggtcacttcatccctacaacaaattcttgctgccaggcacagtggcccacacctgtaatcccagcactttggggggtccaagcaggagggcttgaggctgagttagaagtcagcctgggcaacatagtgagaccccatctctacaaaaaaattttgttttaattagccaggtggctgggggtggtggctcatgcctgtaatcccagaactttgggaggccgaggctggaagatcacttgaggccaggagttcgagaccaccttggccaacatgacaaaaccccgtctctactaaaaatacaaaaattggccgggcatggtggtgcgcacctatagtcccagctacttgggaggctgaagcatgagaattgcttgaacctgagaggtggagattgcagtgaactgagatcatgccattgcatgccagcctgggcgacaaagcaagtctctgccttaaaaaaaaaaaattgccaggtgtggtgatggcacctgtagtcccagctacttgggaggctgaggcaagaaggtcactgaagcccaggagttcaaggctacagtgaactatgatgctatcgtggcactactgcactccagcccagatgacagagtgagaccctatctctaaaaagtaaaataaaataaataaaaatgtccttgctcttcctatatgccaggctatgttaggcactgggaatccgtgttaagcaaaaaggcctggtgtctgatcagagcgcagggtggcactcactggatcaatgtcctggggctcccataacaaaatactgcagacttggtggctcagacaatttcctcacatttctgggggttaggagtctgagatcaaggtgtcagcagtgctgccttctttttctctctccttggcttgtaggtgctgtcttcctcctgtgtcttcacagtgtcttttatctgcctccaaatctcctctaataaagacattggtcctactggattagggtctacccatatgaactcatttgaccttagtcaccttcttttattcttttttattcttttttttttttttttctgagatggactctctctctgtcgcccaggctgaagtgcagtggcacgatcttggctcaccgcaatctccacctcccaggttcaagtgattctcctgcctcaggttcctgaatagctgggattaccggaatctgccaccatgcctggctaatttttgcattttttagtagagatggggttatgccatgttggccaggttggtcttgaactcctgacctcaagtgatctgcctgcctcagcctccctaagtgctgggaatacaggtgtgagccaccacacccagctccttagtcatcttatgaaagaccctatctctgtatgcagtctcatgctgaaatactgggggttaggacttcaacataggaatttgggagtggtgggactcagttcagcttataacactgtctaatgggagaagcaggattaatattcaatgccacaacgatgtacaaaatgacaactgtggtccctggggttatgagagctactaccagggggtttggctgagtgggctctaggaaaccttccctgagaaagtgatggttgagctgagacctgaaagaggttgggggctaagcagagggagggaacagcaggccaggtgtagggacaagatatgctgcagggctgggaataccccagtaggcacatgaagaccaaaggcattaagcggcacaggttgctgaggggggacttctgggcactatgttggagatggtggcaacttaccccaggtaaaaatcaccagagcactcttttaaaaatacagatcccaggcctcatccaggtctgctgaatcagaatggccaaggggaagggcccgagaatctgcattccctcacaatttttcttattttgaaaaatatcaaatctagagaaatggaaagaaaagtacaaggaacacctgaacccccttcacctagactcaccagttgttaacattttggctcatttttgctttctctctctccctccctcactctctcctcaccaagcatctcctaaaaataggggcctaggccaggtgtggtggctcacacctatcatcccagcactttgggaggccgatgcaggaggattgcttgagcccaggagttcaagaccagcctgggcaacatagggagatcctgtctgtataaaattatttttaaattagccagctgtgggccaggcatagtggctcatacttgtaatcccagcactttgggaggccgaggcggacggatcacaaggtcaggagatcaagaccattctggctatcatggtgaaaccctgtctctgctaaaaatacaaaaaatgagccgggcatggtggcacgtgcctgtagtcccagctacttcagaggctgaggcaggagaatcgcttgaacctgggaggcagaggttgcagtgagccgagatcgccccactgcactccagcctgggcaacagggcaagactctgtctcaaaaaaaaaaaaaaaaaaaaaaaattagctcccaggtacgtgggaggctgaggtgggaggattgcttcagtccgggaggttgaggctgcagggagttgtgatagcaccactgccttccagtctgggtgacagagtgagaccctgtctcaaaaaacaaacaacaaaaaaggaccttttcctccataaccacgaccagaacaccgttgtcatatttaagaagagtaatgtcaatccagtaatgtcatctaatgtacagataatatttaaattccctgtggtttacaacatttctttcatagctatttacttgttcagtccaagagccaatcaaggtgcacgcattatgcactttttattgtgtccttttaatctctttcaatctggaataagtccctgccactataaaaaatgatattaacttttaaaaagagagtctaggcttttagaatgccccacattctagatttgtcttaattttcctcatgattaaaatcaggttaagtatttttggcaagaatatgacatagaagatgttgagtatatcttattgcatcacagtgggggcgaacaatgtcaggttgtcccactatggtgatgctgtgtgatctcgcgtttaaggcagagaccactggagttctctgatgtaaaggtacattttccccttttacctagtaaatgatctgtggcatgatgttttgaagagtgtgactgttctgttacccaataccttttttctcaatggctgtagcagctgttcatggttgttgttccctcaatcaattattatattggtgggtgcaaaaaggaatctgcatctttctttccttccttccttccttccttccttccttccttccttccttccttccttccttcctttctttctttctttctccttccttccttccttccttccttccttctttctttctttctttctttctctctctctctctttctttctttctttcattttgagatagagtcttgccctgttgcccaggctggagtgcaatggtgcgatcttggctctctgtaacttccacctcccagattcaagcaattctcctgcctcagcctcccgagtagctggggttacaggcgtgtgccactatgcctggctactttttgtatttttagtagagatggagttttgtcatgttggccaggctggtctcaaactcctgacctaaggtgatccacccgtcttgacctcccaaagtgctgggattacaggtgtgagccactgcacccggctggaatctgcatttttaataagtgcctcaggtgacttttctttgcctggaattttggaaaccccatttaagtcaatataaggaatacaggagaatgaggcattgctaccaaggcagctgaaggcattagctaaagcctattattcattagaatctgctaaaatgcatattctgaggcccgtacaccaaagaatgagaaacgggtgcaaaggacaggcccaggaaggaggattttaatactatctctcccctaccatcctgccaaccgtggatatggtttgtttgttgccaccaaaattcatgttaaaatttgaccttcagaatgaaggtttggggatgtggcacctagtgggagatgtttgagtaatagtggcagatctctcaggaataacttggtgctgttctcccagtagtgagtgagttctggctctggggagactggaatggttgttgcaggaacggattatttcccacaagagtgggttgtcataaagccagcacagtcctcaggtttcccctttttgcacatgtctgtttcccttttgaccttctcccttctctaccatgttgcgatagaggaaaacccttgccagaagcctgggccatgcccttgaacttctcagcctgcagaaccgtgagctaaataaacctcttttctttataaactacccagtctcaggtactctcttatagccacagaaaatggactaaactccctctcccatttcctacccactttgtggtcaccaaaacttgtgaaacactgacttaggtggtgattcttaatcctggctaagttaagtgaagttgcattttcaacatgccttgggagttcttttgatctgtatgtatgtttaaaaataaacctccagagattttgattcaaagggtctggggtagaacccagccatcagaaaaatttaaaacctcttagtgattccaaagtaccaccaagactgagagccactgcacaagattctccataaattgaatataaaaatgaaagccagctgggcacggtggctcacacctgtactcccagcactttggaaggccgaggcaggtgcatcatgaggtcaggagatcaagaccatcctggctaacactgtgaaactccatctctactaaaaatacaaaaaattagctgggcgtggtggcaggcacctgtagtcccagctactcgggaggctgaggcaggagaattgcttgaacccaggaggcggaggttgcagtaagcaaagattgtgccactgcactccagcctgggcgacagagcgagcgtctttctcaaaaaaaaaaaaaaaaaaaaaaattgaaaaccagtctatcccactcttcgttacccctatcctcacagcatcacaggttgagctcaccactagccttaaatgcctggggctccttccacctacttatggggctcctactgtgtgcaaacagctcttggggagcttacaaaagaggtaaaagtcacttcccacaaaagcatgaggacgtgggaaaaaaccacacatacaaacacttataagtattgtacaatcagaattgtacagaccaggaaaccgacattcagaagaggaaatgaccgcccagcgagttcatgccagagccagaactcttacctgggatgcctttctccttcttggctcatttttacttgaacccaagttgaaccctctgcacttcctgctcttctgttggttgggcctggcctggagctatcatcttcatcatcaggagtagcagcatggggacaagggcagcctatcaaggcttattctgggtctagcattagactaagtatctgttgaatgaatgaatgaatgtagccagcctagcacctgcccacaggctgacattaagaaccacaagttcaggccaggtgcagtggctcatgcctgtaattccagcaagactgtttgagctcaggagtttaataccagcctgggcaacatagcaagagctcatctgcactaaaagtaaaaataattgagtgaaactcggtctcaaaaaaaaaaaattagctgggcctagtggcatgcgactgtagtcccagctactcagaggctgagatgggaggatcacttgagtgccagaggctgcagtgagctatgctcatgccattgcactccagcctgggtgacagagtgagactctgtctcagaaaacaaaaacaaaaacaaaaacctttgttcaggctgggtgtggttgctcacgcctataatcccagcactttgggcggaccacttgaggccaggagcttgagaccagcctggccaacactgggaaaccctgtctctattaaaaatacaaaaattagccgggcatgatggtgggtgcctgtaatacaagctactcaggaggctgaggcaggagaatcacttgaacccaggaggcagaggttgcagtgagccaagatcgtaccactgcactccagcctgggtgagagactgagactctgtctcaaaaaacaaacaaacaaaagaccttggttcagataacctctagaatgaatccctttaaacactgaaattagttcatttttcacagactcaggaatctctagaccttgcctcatagcaactatataattcacccaaattctaccttctgtataatttttttttttttgagacggagtctcgctctgtcgcccaggctggagtgcagtggcgcaatctctgctcactgcaagctccgcctcccgggttcacgccattctcctgcctcagcctcacgactagctgggactacaggcgcccgccatcatgcccggctaattttttgtatttttagtagagacggggtttcaccgtgttagacaggatggtctcgatctcctgacctcgtgatctgcctgcctcagcctcctaaagtgctggtattacaggtgtgagccaccgcgcgcggcctaccttctgtataatttctatggaactatgaatttacttagttgctgttgaccggttgacctaaagttatgttgacatttaactctatatttttaaacatcagtgtttagattttgtatgttggagcccatttatttatttggcggccctcaaacattttcccatagcctcgtagaatattcagtggccttggactgtcccttaatgtcttactacagatggtaccacagatgacctccaaaataaaggaagagactttcctgcctgtggacaggagagagaggtgtggaggatgagagcatagtttaacttttttttttgaaaaactttattgagatataatccacatgccatacaattcactggcttataagtatataattcagtggtttttaatatatccatagttgcgtgatcatcaccacaatcaattttaaaaatttttatcacctccaaaagaaaaactggtactctttttgagtcaccccccatttgcctccaataaccccctcccagctctagacaatcaccaatctgacttctgtctctatagatcagcctattctggacatttcctataaatacaatcatataatatgtgtatggccttggaactggcttctttcactcagcacaaggttttcaaggttcattcacgttgtggcatgtgcttcattcattttgattgccaagtaatagtggattgtaccgtgttttatttatccattatcatttgatggatatttggattgtttccacttttttttttttttttttttttgagacggagtctcgctctgtcgcccaggctggagtgcagtggcgggatctcggctcactgcaagctccgcctcccgtgttcacgccattctcctgcctcagcctcccaagtagctgggactacaggcgcccgccactacgcccggctaattttttgtatttttagtagagacggggtttcaccgttttagccgggatggtctcgatctcctgacctcgtgatccgcccgcctcggcctcccaaagtgctgggattacaggcgtgagccaccgcgcccggccttgtttccactttttagctgttgtgaataatgctactatgaacatttgtgtacaaatttttgtgtatgtatgcttttatttctcctgagtatatacctaggagtagaattgctgggtcatctggcaactctatgttttaaattttgaggaaatgccatactggttttcaaagcagcggcaccattttacatttccaccagcaatgtatgaaggatccaatttctccatatccttaccaatgctggttattgcctatcttttttattataaccatcttagtgggtatgaagtggtatctcattgtggctttgcatttccttcattgctaatgatgttgagcatcttggccatgtgtatatctatcttctttgaagaaatgtctatccagatcccttggcctttttttttttttttttttttttttttttttttgagactgggtctcgctctgtcgcccaggctggagtgcagtggtgtgatcttggttcaccgcaacctctgcctcccaggttcaaacaatcctcccacctcagcctccccagtagctgggactacaggcccatgccatcatgcccagttaactttttgtatttttagtagagtcagggttttgccatgttgcccaggctccttgcccattttttattatttgtctctttattatagagttgtaagagttccttatatattctagatataagtcccttaccaggaatatgatttgcaaatatttcctcccgttctgtgggatattgtattattttgccaaggctgccataacataatactatagactgggtggcttaaacaacagaaattggctgggtgcggtggctcacacctgtaatcccagcactttgggaggccgaggtgggtggatcacttgaggtcaggagtttgagaccagcctggccaacatggtgaaacccttactctactaaaaatacaaaaattagccgagcgtgggggcatgcacctgtaatcccagcttctcaggaggctgaggcaggagaatcgcttgaacctgggaggtggaggttgcagtaagccaagatcgtgccactgcactccaccctgggcagcagagtgaaactctatgtcaaaaaaacaaaacaaaacaaacccccagaaatttattcctcacaattctgaaggctacaattctgagatcaaggtgttggcaggtctggtcccccagccctgagtcctctctccttggtttgtaattaaccttcttctccctgtgccttcctctggtctttcctctgtgtggcgcatctctagtgtctcttcttatgaggacaccagtcattggatgagggccccatccaagggcctcagtttaagatgatcacctctttaaagaccttatctccatccacagttacattctgaggttctgagactgtaaccagtacagttcagcatatgaatgggggtgagggggcacacaattcagcttataacagttattttttcactctctttttgttctttttatgtttaatttttttttttttttttttttagagacagggtcttgctctgtcacccaggcgggagtacagtagcaccatcatagctcactgcagccttgaactcctaggcaaaagcaatcctcttaaatagctaggactacaatcatgaaccactacgtctgcctaattttaaaagaatttgtagagacagagtttcactatgttgccctggctggtcttgagctcctggcctcaagtaatcctcctatctccacctcccaaaatgctgggattataggtgtgagccaccaggcccagccataacttttcactttcttgatgatacccctgaaagcacaaaagtttttaatttatctatttttttttcttttgttgcttgtgctaatatctaagcaactactgtttaatccaaagtcatgaagatttaggcttatgttttcttcagagagttttatagttttagctcttacatttagatctatatgttgcatatagtatgaagcagggatccaaattcattcttttgcatgtggatatccagttgtcccagcaccattttttgaaaacactattctttccccattaaattgtcttggcactcttgttgaaaatcaattggcagtaagtgtaagggcttctgtctggactctcagttttattccattggtctgtatgcccatccttatacccgtaccaccctgccttgatgactgaagtttcctagtaagttttgaaatcaggacttgtgagtcccccaacttattctgaatttactttaacttttgataccgaacacagtgtgagaggtgaatgaacagcatgacattggagttgggagccccctccctccaaaggccttattttaggaacacaggccccaagtgccacacaagccttggagagatgggttcccatcctctcagcccatggctcttcattatcaatcaatggaaacattcttcggagaacaatgattcccttgggttattttaaacatggctttaagtcttccccacatgctctactgtctaattgcttttcctgaaacagtgtcattcacaactggattattaatgaactgagagggagccagggagccaatgaagggggcttacagagttcctggagagggcctgggggcctggaacaagttcaacccacagattttctctcccccaagaaaggtgactgagcaaacagaaaatcactaaactcaggtgatgctggtggcctcaaaagaatattgccagtgaaaaaaaaaggattcgggcgagttcctcaaacatgacagctgagaatcaaattaactgggtaccatccccaaactccccaaacttaaactctgaatttccccagctggctggccctggggtgcctagggctctcatctgtaggccgggaaagctcaggaaacaaggcctttgtggagaagagaaacctattgttctaaggccagggttcagcaaatgtggattccagagaatgtttggggaggttttctctgctttgtttatgaactttcttttctcttcctggggtggtgatggtggggggtgactctcagcaacttaaatagttaaacccattgtgttgtaaagaaaggctggtgcacagagtgcagaggccttcagccccagaaagaggcttgaatgaggtgacagaagccaccgggtatgttttgctttttatttttagcgttaaatctcagggaagcagcccctatcttcatcctgcacatctcaaagggcgtcagacgtcagcagaggtacgaccacttccttcctccagcgcttcacctcccttctttccagaaagaggaaatgatgcgagtccacaccgcaggccacagcccccatgtctcggccccagcagctgggggacctggccccacagatctgtccccagcgcaaggccagggccggcccctggacctcctgggaagccttcagactcaggccgcgcaggccttcaagctaggaaccctgagttcctggccctggcattcattctgtgtgaccttgagcaggttaccactcctctctgggcttcaggattcccgtctgtcaaatgggagcagggataccgtccttggcttccctctttccatggtcggggtgggggttaggaaaactattttggaggagggggcagcgttaggaaaactattccgaagcctggccacgtcccaaccggtttcaacttcctgcagctcagaagaggggtccccacccgagagcgccgggaccctgtcccgcgctgcctcccaagccggatggggttgagcgcgcccaccccagtcccaggagctcaggccccgccttgggggaggagccgagaggcggcgcggaggctcgcggccgagcagagccagctctgtcgccgctggagcagctgcggctcggggacccacagacacagccggggtcgggagccgcccggggcagggctcgggagagcgggtgagttccccggcggcgccaccaccctccttgcgctctgcggcttcgcagggcgggggatgaggatggggcggggaggtggtcccagcctgctatcacctagctgggggccggggcgctttggccaagggacgatagcttgagataaatgggagtgtggggactctggaaagacgggtaccgagagcgctaggtccgggagtcgggctggaatgggggcgttctccccggcctcgcaattccttgacgaggccaggggagggggcgcattggcaggttgttggctgcggccgtcgtagaccgatcttggggcggggaggtggggtcctcggtctgttctggactcatggggccgccgtctgccgggggtgcaatgccgggcggcgggagccacagcggacaccaaacaacccccccccgcgcactctcccggccgggcatggtggtgccgccccctcgcgtggcggggcttggtcctggcgggcagcggcagggcgcagagagcgctcctgcccgggcgggaaagatccccaaggcaggcgcctccacctgcagacccgccccgcctcaggatccggctgacagcaccagccagcccggggagaccccgcgagtggtagttccccgggaggggcgcgcccggcctctcccagggccccgtgcgccggcggctgggtcccccgcgccaggagcgctcccctctgggcgactccggctcatcgattccggcccagaggagcgcccccgggcgccgaggatgggcggagacgtgcagccgcccctgagaggtcgcccagaggggtctccccaaggtcacccggagtgcccaggctgagctgcccagaccgccccgggtggagagccgggaggcaggcgctcgctgccctcctccttcccccatgtagactcccttcctccgctcccccaccccggcccggcctccagcttcactggagatgctgatgatgcagctcccagcccttggaggataattgagcctgggagagctttgaatctggccctcctgagaccccagggctgcgccgctgccgcgcgccaggcctgggtcccggtgctcccgggcacctcaggagcggagggagagggatgtggcttcatcagcgcttctaggaaccgaaaaccgagctgcctgcgcgcccatgtgattgcatttcacataaagggcccctgttttcactgtcagaagagccccccagctctccgcggctctggacaccaggtgccgcctctgaatcaccctctgtggaggacccggggcccggaggtacaggcgccctttcccgcagggctctccctggaaagggcctgccgatggcggcctcagtccgcaggggtacttccctgtgtaccctgccatttcctgcggctggtgaagcaccggagaaaaaccgtccatctaggaggcctcctccaaggctggtaataaagcttcttagcccagccagcgactagctgtctactcgtgggcaaggtacttggcttctggagtctcaactgcctctaagatacggggctaacagccgccaggctgtggggagatgagggagaggctgggtgcagcagagcgggaggatgaacactccttggccaatactggccgccctcgggattggctttgagtggggcgtgtctctcttagacaggtgcagaagtggagccctggtgggtggttctgcaggggctgggggagtttccacatcttcctcccccagctctgtcataaaaagccagcttgcaggaggccggtgggggccagcaaatccttccagccggctgcctgctcacacggcccttcccacacaaatctcccatgcccttctctcccacctgtcacccaaatcccatcttcctggctgagtccccaggatgctgggggcaagatgtcaaccaggccaccctggactgtcaactctgtgcctacttgtctactggggtctacctaacagtgttcccctgtcctggaaccttcctggctccagctcttcccagcctctgtaatgtcttctttcccctcttttggtctcctaccaccgtgacactcattagtggctctgtggttcatgtgtcaagggccccgtgccatctgtgctctccagatcatccatggcctagaaagacacggtaggcaaggccctgtgcccactcagactttgctctccctggtaattgacggagtggaggttaaattctaatctagctgttaagtcatttcaggagcttgagccacagggctaagaggatactgatgtaggcaggtggtttttccttaaagccagaacctttctcctttctgcagagcccatttgagccctttggaaactaggcctatgtgtgatggcctcacagaatcctcacaaccccgtgaagtaggcattactgattcccattttgcagatgggaaaactggggctcagctcctctcaaaaccagctccatgccccaagtgtagcaacagaggctgcagccaacctggtttaggagaaggcagaaggcacatacctgaattcaggtgctgtgcttggactcttgggaccccatccccccaacctttccctcccctctcccaacctagccaccacccctcctgcacccaggactcttgtcacatttgttgaccaggaggtcccaactggcactcttccagcagagaccaggaaaaccttcactgtcctgagtgcatcttagcaattgggcttcaagaagggctcggacaagcctgcctcttacagaaagctacgagtatgaagagtgagggagccagagaggtctaattttaattagggatctatacctaaaagctctgtgaccctgtatacatgacttaatctctctgagtctggttttctcatttgtaaaataggtatcacagtaatgcctactttgtgggattgtaaggattccatgagaccattaacacatagaaagtgctcagtactagggtggagcatagtggctcacacctgtaatcccagcagtttgggaggccaaggcgggaggatcactagacgtcaggagttcgagaccagctggccaacatggtgaaaccccatctctactaaaaatacaaaaattagtgcagcatggtggcgcatgcctgtagtcctagctacttgggaggctgaggcacgagaattgcttgaacccgggagcaggaggttgcaatgagccgagatcacatgactgcactccagcctgggtgacagagcgagactccatctcaaaaagaaaaagaaaaaaaaaagtgctcagtacagcatctggtgtgggtaggaatgcaggaaatgatcattgtcaccatcactactatttcctcctttgtgttggactctcaaaggtcccacctcctccagtgctagggtggggagtgagtgcgaccctgtctcttctgcctgtagccatcaggacggggaaagcctctcagcctgtctcctggggcgggggtgggggctcactcctgggaacttgagtctagcaccagcttttccccggggagtctgtgagcagccacttagcctttctcagctgactgccattttccaggattcattgattcattcaaaagacgtttattccatcccagcccttgtgcttagcaagggatttcaagatgaatgaggcagctctcagagttctccctctatggggagaggcaggcctggagacagataatgaggacactgtgggataaaggctgcaacagcaagaagagagagtgacgagcagatccacatggctcaggctgacccaggtctgaatcttgaagctgccaccttgtagctgggtgaggatggacagaggccttacctctcaagcagataagccacctccctaagatgatgatgtgaggagagaagtgagacactgtggataaaaaacctagcttggaccaggtgcggtggctcatgcctgtaatcccagcaatttgggaggcagaggtgggcagactgattgactccaggagttcgagactagcctgggcaatatggcaaaaccccgtctctacaaaaaatacaaaaaattagccaggcatggtggtgtgcacctgtagtcccagctacttggaaggctgaggtgggagaatcacctgaacgggggaagtggaggctcctgtgagccatgattgcgtgcacctctgcactctagcctgggcaacagagtaagaccttgtttcgaaaaaaaaaaaaaaaaaaaaacaaaaccaaaaaacttaaaaacccagcttgggctttctagatattaataagtgctcacagatgttcgttgctattattagtctattattgccaataacaggtgggcaaaagttgctgtgggagcatgttgagcccttcagtgacagttttccaggtggtagggcagccctagccgggagaacagcatgtgcagaggcaccgaggcttaaaagtgctggatgtttttggagagcagtgggaggagttgctgatggagcagagtcatgagaaagtttgatggaggcagaagcaaggccagggaggtagcagaggctatcctgccgggagccccgaaggattaaacactcactgacccgaggcagtccctctgcaccttccttggagggtggttctctagtgagggttgtccaggaaacttcaggattaacttttgcatgggaggaagggctggtctctgctcaactatccatacattcaccatccttccctcttcattccacccaggaagcacgaagaagaagaggtccactccctcttcctgagatgcttttcccacctctgcacttgtttctctcttcctgggactcagtttctcacctgagagaagagggtagaagtggaggaagcgtcatgacctgactcactgattgatcatgatatagcaccaagtgcatttctggatgctggtcactgtcaaaggtctttacttgcatcgccattgaattctcataccaatccgttgaaatgaatgcacttatcccccactgcacagagggagaaaccgaggcacagagggtgaggcaatttgctaaagggcatgcagcttgtaagtgacaggaactcacgtcttggggggcatctcaaagttgccatgtgctatccttcaccaccttcttcacacactttgtaaatctaaggctgactgcagaatatctggcctcttttgctttgtgtacctttgggcgctgggcagtaggcattttggagatgggtcacagtggggtgtgctctgggtatgtaacctgactttggggaaattcctgggtgcagacgctttgtggggaggtgttcttggatgtctcagaatctagaatggcattccttcgcccacagatgtgccttgatgcaggcaatgtgcagcttgattgatgtggcaagatggtggctgagccccacggtggccccaggaaggaatgaatgaatcttttaggatggctgatcagagcatcacatgaccacagaccctccctgtttcagaggacatccaaacacaggcttacatttccttttacatgggggcaaagtttggggccagggttcaaatgctggctctgcctccactggctttggggcctagggaaattttttcacttccttgaaccttaatttcttcatctggaaataaagatgaagaaataagttgctaattttagcatcttcaataagttgctaaatagtaactcacaaacacaattctgaattgtcataaggatttgtaatcatatggaaaatgcttggcttccaagctgtagataatattgatgtaatatccagcagatttttctctgcagtacttataattgtgattatatggttatatgtgagcattactcttttagtcttctgtttcatccactagacctgtggttctcaacttggggcagtttgaccctccccaggggatatttggcaatgtctaaagacgtttttggttgttacaacttttcgggggatagtgggggagaggagctactgacatccagtgagtagacaccaggggtgctgctaaatatcctgtggtgcacaggagagcacccccacaacagaaaatgatctgatcccaaatatcaatagtgctgaggttaagaaagactacactggacgatgagccccataaggtccgtgactgtgtccaattcattcagctgtgtgtctccagttggccagcgtgatcagcatgatgtccagcacacaggagacaatcaatatgcattaaaggaatgaatgaggacttggaaggccttatgtcccctggagtcccaggggtttagcttgtggaacattttgaataggcagaagagatttagatgaacttgaatgatgaacagccaattagtaactcaggccaaagacattcagaccgagctctctgttttccttcccaagcaggtgcttgggggcccagattatctgaattgttcctgccatcaccactgcattttacccatgtagatacaggacccgtctttatctggaaagtaggctggggcagaggagcataggtgctgtcagctgggcccttgggatttgccaagctggggcacagctgcttgtcagcttcctgttttgtccctttctagtggaatgaaggaaacccactgaatggctattttccactgacatttacagcaatgtgataggccttggattaatgaggtcaaactgcagtgtgaaatctgcctgataacttgaagcttggccaacgggaagacatcgcttgttttctttggaccgtttgatgtccctggatggctttaggcaggaaagcaggggtctcaattctgtacgaaagaggagggtgttttacttcctggaattatagaggccagaggtgtctctttttcaatttattgggaaggtttattttaatatggacttagaaataaataacttattaaagtgaaggttcacctggagccttaggctggctgctaagtgtgagtctgggctgttgaagggactgtgctgttcttctgggtctctgtaggagtttgaaggagaagactggccccaaagggtgtttgaacaggttagatgtgcccattggttagaacttacttggatagggagaagggatctagggcgtatccacaaacttgcatatggatcccctttggtttcctgctaaaatgcagaaactgactcagtagggctgggtatggagttttctgcatttctaccaagctcccagggggtgtcaagctgctagtctgtgaactgcactttgagaagcaagggtatgggagaccccaagtctacaggtgagggttccctggtgcaaaccgcttaagcatgaaagcaaatgcagcctgttgtgcctgttcacacagccatctgctgtgctggctggcttgcggagtcacagatgttcactgtgccccttctctgtgtgcccaggcctgggaccagacttgacaaagaggatgcttggtctcaaggagcaactcagacagccagaatgtcagctagaatgatgagctttgagtactttcaaaaacatgtatccaggtacatggtgttcctgggtcatctggtcacctgggacttgtgagaagtacagatgcctgggccttagcccagtccacctgtgttagaatcagccaatatagggccctgaaagtctgtattttctcaaagtgtgccaggtgattctgattcacagccagactgatggaagggaaggtgggaggaagaactgccagtacatgcaggttaattgctcagcaggacctatgtaaggttgtagagttgtgtattgctgatgggcacagtggcactcggctaaaggagaggctgaaatctagcctgtggatccacttgccaagctctgcaccctgcagggttgcatctgcttagagggacgggcacctttttcttaatattcatcataatcacttggtacttattatgagccaggtgctgtctacttaactcctttagtcctcctaacaactctaaggggtgacatcatcatcatcatcattattattattattattattattattattattattattattattttgagacacagtctcactctgtcgtccaggctggagggcagtggtgccatctcggctcacggcaacttctgcttcccgggttcaagtgattctcctgcctcagcctcctgagtagctgagattacaggcacccgccaccactcctggctacattttgtatttttagtagagaaggggtttcaccatgttggccaggctggtctcaaactcctgacctcaagtgatccacccggctcggcctcccagggtgttgggattacaggcatgagccactgtgtctggccaggtgtgactttagtgctactctgattttactgttcaggaaagtgaagcagagaggttcaatgtcttactcaaggtcacacagccagtaaatggaaaagtcaggattccatttcaggacatccggcttcaaagtccttgtactgaatcattacactctctggccctttctttgcataaaaatgctgtcttctctttatggggctatccctactctgagggagtaccttttttcttgtccttccttcagaggggggaaggctagcaatgaccttggctggctttagagtcaggtacgggtttgattcctacctccagcacctactgcaaccttgagtaagttacatgtgtgtatttgctgagccacaatttccccatatgtaaaacaggaataataatagtataatataaattgatatgattaggcatttagcctctgcttggcaggtaggaggtacctgatacatgccaactattcttatggcattattatcattagagttagtccctaggagtattcaggagctagggaaataggtgagcaaagcactgtgtcattatgtccccaggagctgggtcattcattttgttcactaggttacttatggccattacttacctgggcatccctagtctcctccgcttcttggccccagagtctgtgccagcctggagagttctcagaatgtcttagttcagactcttagtcagaactgcctttgtttcctcacatccaagaacaagtaaaacatacaaattttgacacttattctctttaggtctcttgactctttttggtgactttctctgtctcctgttttctttctggaactattgctgtcgttggctatcccatggactggatagagaggaaatgttgccttataaacattgccaattaccttataaaaatatagggaagattttcaccaaaatgtcattcattttttttcttttatatataaacttaagcttttgttttcctatggctgtatgtcatgctttttaattacacaaagtatataagtgtatcataagtaaactttccccatcttctcagccactcatcccttttccccggaataaatctataaatgttttatgtatttttccataaatttcatatgcatatataaacccatattcatttacatgtttatccatttttctttttaacacaactatacaaaactctcctgagatcttctttttcagctaatttatctgagcacatgccaacacacagatatacctggatctttaaggctatctgatagtccagtgataaaaatgtaccatcatttgttttctagtttcttgatgatggctaagatagtttccagtttttttcctcctacaaatgtataatgttgcaacatccttgtttgaacagtgtatatatctttgtatactctacatactgatgattttattcataaggaaaattcctggcagtttcaactgtgatagacattgctaacctgttctccaaagaggctgaaccaatttctgtttcctcaacagtgtatgactgtttcccccatctattctccagcactgaggattaagtaactttcatttttgtcagtctgacagatataaagcagaacatttctgcataaggttctacagtaatttttagattttatgaccctttggattatgcctacataatgatgatcaaatattcagaaactacattgtacctggccttaggcttggaattggatacaaaattaaatgaaaccagcttttgccctcaggttgatcccatctcctggagttggcagacaaatgaacaaataaaatgagagcaaaactgtatggttcacattgtgctagagaaatgcataagcttagctaacttttgtttgataaactctatattcattaatatcacaaatgaattcataaaataccgtatgcattatgtcccagggtgtgaggaggcttgaaattctcaaaagaaaacaacttgattagaagcaaaaagaaaaaaaaaaataatggagcttatccttagtgggggcagcagaagaagtgggaagttaggaaggggtgagtaattttagaatagtctctttggtagtttccatgttcacaaatagggtttgtttgagggagcctgtggggaaacccagctgagtttgcagctggcactgattaccgatcactcaaacccgggcagatctgtacgttggtccagatagagtgggagcaaggaaacaggaggctggctttaaaaatcagcaaccttgaagctcatagaggttggatgtaggtggcataaataggctgtttaccacagggattacaagcaggtgtgctctgaacaggcctgtggtagagtggatccatagaatggttttcaatcaatgaatgaacatcaaacatctgtctatgtattgtaaagggacctccttctcaaaaagaataggtccatgtagaaaggggtatgatcatctggtcgacccacctggggggaaccaagccttagctatatacattttctttgggcccacctgtcctagatagctcttcattcacttgagacatcttaaaagcaacacaacacaaggagcagttgagaaaatcaactgaatcagcgctgtggaatgaacctaaccattgttttacaacaaatcccctcagcagcgatatatagagccaattgcaaagcatgcagagtggaaaagggactgtgaagaccagcacaatcttagtccaccctcttacaggaggcaaagggcaggggccaggcgaggtatgtcctggttctggtcccagggcccaccctcctcctcccccattagccaagtctgttttgcccagtttgatgttacagctcttgttctaagtcaaaggaccactctctcatggcagaacagaaattcttcatgaattttcagtctcttggccagcctcctgtccaccctctcccacgtattgaatacctaccatgtgctgggtggcgctatcatgggatgtaaaggtgaacaatacatatcccttgtcttctgagagcatccagtccaatggaagaggcagatctgaaaccagcaattaccagagtgctgagtgccacagaagagatgtggtcaaatgccttgggactagagagtggaacgaagactgtttggcacaggagagataaagaacaattcagaggcaatattaagacattgaggctgggtgtggtggctcacagctataatcccagcactttgggaggccaagctgggcggatcaccttaggtcaggagttcaagaccggcctagccaacatggtgaaaccctgtctctactaaaaatacaaaaaaattagccaggcatggttgtgtgtgcctgtaatcccagttactcaggaggctgaggcaagagaatcacttgaacctgggagccggaagctgtagtgagcagagatcgcaccactgcactccagcctgggcaacaagattgaaactccatctcaaaaaaaaaaaaaaaaaaagacattgagacaatattgtctaaatgagacaaggcaagtgctgagcacggtgcctggaaagcccttaagagatgatagctattgtcattttagcacttgagctacctctcaaagaacaagaggagtttgccaggtggagagaaagaagggtactgccactcataaaacagcatgtgtgggtcgggcgtagtggttcatgcttgtaatcccagcactttgggaggccgaggcgggcggatcacgaggtcaggagatcgagaccatcctggctaacacggtgaaaccccgtctccactaaaaatacaaaaaattagccgggcgtggtggcgggcacctgtagtcccagctgctcgggaggctgaggcaggagaaaggcgtgaacccgggaggcggagcctgcagtgagctgagattgtgccactgcactccagcctgggcgacagagcgagactccgtctcaaaaacaaaacaaaacaaaaacagcgtgtgtgaaagtgaggaggttagtgtggtgtagtgaaaattgcatgggctttgtagcagatacatcttggttcaaatcttagccctgccacttcctagttgtgactttgggcgtgtcaagaggagcctccttttactaatatatccagtgggggtaatgatgcctgtttctaagactcattgcggggattaaagtcaatttatgcatagtacctggcacacagtagagtctcagcaaatggtgagtaccactggggaggagtgaatcatcagtcctgttcggtgcagctggaaaattgggtatttagtgagttgggggaggggagggaagtcaggctggccagagagaaagctaaaatgtcaaggcccagatattggacggtttaggctgagagcttgaaactggacagcataggcagtgggagccatcagatgcttccctccaagggaaatacaggatcaaacttggtttaagagtgaaaactccaccagcgttgtggatggctggttggaaggtaagcggtggaggcaaggaaaccactttgggaactgctgcattcaatattcttgtcttgacaacagctcagattagcatagcaaaggctcagttaactcctgcagtcaagtgctgtctgggcaggcagttatgggcagtggtcgagtgtgtaggcttcactgattgtcctcttttttttttttttttttccccttgagacaagatctcactctgttgcccaggctagagtgcagtgatctgtgatcgtgcagtggtgcaatgacagttcactgcagcctcaacctcctgggcttaggcgatcctcccacctcagcctcctgagttgctgggactgcaggtgggagacaccacacccagctaattttttaatgttttgagatgaagtctcactgtgttgtccaggctactctcaaactcctgggctcaagccatccttccatcttggcctcccaaagtgctgggattcaggcatgaaccactgtacctgaccccttgtaattcttgcaagaaaaaggaaaaaaaataaaaaagagcatgggcttcagtgtcaaagccaatctggatttgaatcccacccctattgcttactggacattgggcaattacttaaccctatggagcttagtttgcccttctataaaatagggattaatagtacttttctcataggcttgctgtgaagattacatgaaatagtatgagtagctaaaacacatagcttagctctaggaatgcagtgagtgttcagtaaaagttgataattgtgataaaatatattactagctgggcatggtggtagctataatcctggctgcttagggaggctgaggcgggaggattgtttgaacccaggagtttgagaccagcctagggagcatactgagaccctatctcaaaaaagataaactaaaaaataaatatattatgtatatgactatagaagacttttttcatgtaactcctattaacatcctctggcgctactagtgttctaccaaaaacatcctgctttcagacttcctggagaagcagcagcactttctgctccaagaaatagtaaggagagttgccaggttctgacacagtggttcttgggtgcacatgagacccacctggggagcttttaaaaacgtcaatttctggctgcgttccagaccaattaaactagaatctgtcgaggtgggacccagagagcagtatttaaaaaaaaaaattgtgatgatttcttaaggaaaaacaaatacacaaaagtacacaaatcttaagtggatcaatttttcacaaactgaacctatctatttaacccatatcctgcttggagtgctaccagcactccagaagccccctctccaaccccgtatgtccctttccagtcactccctacaccctgaaaccacatagattagttttgcctgttgttgaattttacataaatgcaatcatatagtatgcatttttgtgtgtttgggttattttggttaacactgtttgcgagagtcatccatattgttgagtgtaattgtatattgttcattctcattgctgtacaatgtttcattgtgtgaacaaaccatattttttctccaaactacttctgggggcattttgggttgtttatactttgcgtctattagaaatagtgcaattaacattcttgtgaatgccttttagcgaatgtatacagaaattgctggccgggcgcagtggctcatgcctgtaatcccagcactttgggaggccgaggcgagcggatcacctcaggtcaggagttcgagaccagcctgaccaacatggagaaaccccttctctactaaaaatacaaaattagccgggtgtggtggcacatgcctgtaatcccagctactcaggaggctgaggcaggagaattgcttgaacccggcaggtggaggttgcagtgagccgagactgtgccattgcactccagcctgggcaacaagaacgaaacttcgtctcaaaaaaaaaaaacaaatttctgttgggtgtattcctaggaattcaattgcaggattataggacatgcccgtgtttaattttataagacattgctgaacagttttaaaaagtggttgtaccaatttatattcccactcagtgtgtaagaatttttgccaacagttggcattttctgtcttaaaaaaaaatttgagccaggtgcggtggctcacgcctgtaatcccagcattttgggaggccgaggtgggcggatcatgaggtcaggagatcgagaccatcctggctaacacagtgaaaccctgtctctactaaaaatatatatatatataaaaattagctaggcatggtggcaggcgcctgtagtcccagctactcaggaggctgaggcaggagaatggcatgaacccaggaggcggagcttgcagtgagctgagatcgcaccactgtactccagcctgggtgacagagcaagactccgtctcaaaaaaaaaaaaaaaaaaatttggccattctgatagatttgtagtggtctttctctgtgatcgtcctgtatattcccagcatctccaagtgattccaatgccaagtttgagaacgtctttcctaacagattttgcaaaagcagagtagaactggggaaagagatgttgtaatggtgagtgcctccccatggactccctgtgatgtcccagagtttttggtagaactgacctggctatcagccagtggagggagaatgttcacatgtgtcaaacctgacagcctgcctctcattcctatgtgctttatttggagcaaatggctccaccagaagtgatctggaagctaagggggaagcactatgaagctctggaaagatgccacagcaggactttcatctctttttataatttaagacctgaatgagaagggaagatatgagaagtgactagtgggctatatacacattgtcagagaagaagagctggtctttgtgacatatttttttgccccaaaggctgcctagaccctggcacttggaaggtgctaaaaaatggtcattgaaataaacatattagaactatccctagtgagagacaccacccaaagaggtgcagaggaaggtactggtgagaatttagtggaattgatgctttgggttcttttctttgtaatttctatgttgctgctgagatttcctatctgttcttttattacaagcataatttcctttacattcttgagcaaagttataactgctttaacaatctttattatttccaacacctgggtcaccttgagattggtctccattgattgccttttctcttgagtttgagtcacattttcctgtttgtttgtttttaatttgcctagtaattttggattacatcctaaatgttgtgaatgagacctgaagagactctgaattctattcctcagaaatatatatatattaatatatataatatatattatatttacattatatataatttataatataaatataatatatatatttttttaatcaggcaattaacttgaccaaactcaaactccaaactcagtctttcttgggtggacaacatctgaaatctttgctgaattcatttagctttagttgaactacttgaagtctgccttgtatgtacatcattcagtgagatttgggcactgtttatactcagaatttggggctactgttctgtgattcttttctgggatatttctccttattttccagctgtggttacctgaactctgtctttaaactcctcaaatagtaagagagtagttttctatccaagttttagctagtaagtacagcactgactgggcgcttcccgcaaataaaaagccattaaaaacacgaaagttatctagtgccatttctttccttcaggtgttgcctcctctccagtttctacttgcttgtagttgaacacatttagtgccttccaatcttttttttttttttttttttttctgtctagagttcgtaatagttttgtgtgggaagtttggtccagaaagagctactttgcccttactagaagcaggacctctctgatcaatagctttgttcatttagggatccttagacccaccctactttattgcctacctcatatagatggcaataaatatttgtttattggctaaataaataggatttaaattaaaaatggaagtgaattttcagagaaaattgccagaagaaaaccctgaaactagtagttacttattgttggcatcaagtatgaaacagagtgttcaggaatttgctgagtagaaggatgggtgtggtagtagagctccagacatttgagtgtagaccaaagcagttaacaaagtgaacctgagattttcacatgaggagataaattcaattgtgttagcaataccactttcgtggggtgaaactatggcttatagagaagttatcatgttcaaaggaaatacaaccggtgagagggaagcggaggtatgcttggagttctgtatacccaagaggagggaatcaaagtggaggaactttggctggagatcaaagaggggaggaacagaagtaatgctctaaaggcagaatactacagcctgcttctctgcatggtgacctggaaggtcatagatccagtactgagacttcaaaacctgcctatgggatggaaacttcacttaccaaaatgtagggcatctggaaactttctgatttattgtactaacagtttcatctctcagacaggagaggagagaggccagttgctgttgtgaatctggtttgggagttaccggatgaagtgaaagtgctcactgaggccaggcacggtggctcacacctgtaatcccagcactttgggaggccaaggctggcggatcacttgaggtcaggagttcgagaccagcctggccaacatggtgaaaccttgtctctgctaaaaatacaaaaattagctgggcagagtggcacttgcctgtagtcccagccactcaggtggctgaggcaggagaattgcttgaacctgggaggttgaggttgcagtgagccgagatagtgccactgcactccagcctgggcaacagagactttgtctcaaaaaaaaaaaagaacaaaacaaatccaaaaaacacacaaaaatgctcactgaaaaaaggagcacccatagggggttgagcctataggggtttggaaagcagattttatgaaatttaggatgagatatatttcctgcccaaggctccaaaagtgatgacagctccaacagtaagggaagttatgactttaatcagatatccttactctgcatagatttcatttattttccttcaaggactcctcttaccgtcatgcctccgtggctcatctttcctgtctgacatttttttttttatttttaaggagaggggatattaaaaatacttaactaatggcatagagactgaccaatcaaaacagatgccagactaatcagaagagatgctaaccacacacaactggaacatcagccctagttacgagttccctaacctctccgagtcccagttttctcctctctgaaatgggaacaatatctacattgcagagttggtgcagtgattcccagaaaggttacatgcaaagaacttggcaggtggaaggtatgctggacacagaagctgccatgattacctggcattctttgtttctaggttcatttcatgtatctagtttataggttctgcaatgttagcctttagtttcattaagcatgttttactctatactgacttcagcaagtatttgttctattaccagttggtctctctggttttttggccaaaatgtccccatctccctggtcacgaatactgtggattttctgaaatcttcttgaaattcatgagaaagatctgttaaagatggttatggttcctttagagattttcccagttccttcttctccttctgctttttatgggtgtagcctttggagttaggcagacctgggttcaaatgtcagttccatcccacactggctatgcacttaattggaatctgctctctgcgttgccctctgtcttcctcttctcattcttttgtcccccagggtaggactttttccttcaagttcaattctatgcttttaatcgtccttgtttccttggaattattctctgagcttcagtgaacaaactatatgaaaagtttttaaaaattcccatcccaggctgggcatggcggccacgcctgtaatcccagcactttgtgaggcaaagatggatggaatcactggaaatcaggagttcaagaccagcctggccaacatggtgaaaccctgtctctgctacaaatacaaaaattagctgggaggctgaagcaggagaatcacttgaacccaggaggcagaggttgcagtgagccaagatcatactaacacactccagcctgggcaacagagtgggactctgtatccaaaaaaaattctataccaactacttcctaactggctaagaatatccctggctaaaggggaggagatagcttgttagggatatttgaggtttctgaaatggagagagtggtcttataaggcagcaaattgtgttccccttcctcttatgctggtaatggtgtggagcccaagatgcttcaaatggacaagacagtgatccccagacctggatgaggaagggtgtcagtggcgacagtgccttggtccttttccattcctgaatggaccctatccaattaccaacagcatgctgtctccccacattccagggccagccttgggagggggaagtaggaactagaaaaaaactgtaaaagagccgcaagtgctttagaagatcttcctggtaaaatgcaagaagatatcagaaaatccattgtattagtgatcagggagataaggggacattttggttaacaaaccagatagaccaatttgtaatagaacaagtacttgctaacgtccatatggagtaaaatagggactgccctcctctgcttgagttcctagagtctggatctagtcaccttatcagggtggagtacagttcttcctttgctccctaggatgggttattggaaacattcctatgtgaacctgagatttccttgatgcttatctaccatggatgccacagtgagttgttgctgttgtttggatgatattctgggatttgaagggcctttccactcatacctgataacttcctagatccttggcctcccaaagtgctgggattacaggcataaagtaccatgcccagccaaggattttaatcagtggatacaaaggcaactactggatgatgtagaacagaattgcgtactcagtgtgcatgcagccacttcccacctcttcagccatggcaggctttgctaattgatcacaacacacgttctccctgttatcacacatggcttcgtaatccctctcctcacagtgcaccaagtagccaccaccaacctaagtggtggcacaagagaggaaagtttggtcatgagtgttgtgctgggagagaaaggcagggattagaggccacccccagcctacccgatgtgaagggccatccccaatttaataactgtgtaacccaggagtgtgttcggtagccacaggtggcctcctttggaaaatgatccctccagctgcaaagggagtttttatctccctgtgaagggagggggtggaccacactccctcaagcctggagaaactgtttgtaatttgactcccgtttccccaagcttagctattacataagcttctttagaagacaggctgtttggtttagcaccgtgactgtgactgactaatgcgtttgtagacatcatgttagctttgtgtgtgcccctgtccttggcacccttgttcctgtcccctacggccttctccacactgctgtacttacccaaaagtgtgtgggcttccctgggttcaagttcttgcaggggaagctcagcatggaagaccagtgtgttcatgggtattcctttacctgtttgagctgtggcctcctttgaagttttcttggagctgagcctgagagagcggcttcaccctgacaggcagaaccaatccaaatcatcaatcagcacctgcttaaaatgggccttgcaagttgtgtagcctggtggttaccaaatgctgggtgcagatatgcatgatagagtgcttagtcccaatacgatgccagcccctgcaggccaggattggggctcatgggccttcatggggccattcccgtctaccacccaccatagacctctaaaggccatggagttcctggtagtggggactccagcatcatgccatggctggactttgttgaattatcactgttagacagtttatcctcatgccaggctgatcctagttgttctttttaaaaaattattcatgtatttattttttaaatgatttatttttattttttagagacagggtcttgtcctgtcactcaggctggaatggagtggtgtcatcatagctcactgcagcctcaaacccctgggctcaagtgatcctcccacctcagcctcccaagtagctgggactagaggcacacgccaccacacctggctaattttaatttatttttgtagagacggggtcttgctatgttgcccaggctgtggatcccactcttcatattaccatgcctaagcctcactctgccctccagaggcctggaacaaagccgatccttttttgttgccttttgttaacacctggtctgctcccaatatggcccagccagttcagacagaggtcagtaggtctgttattgttccactgctggacatgatgacatgattcttctcctgggaaagctcaagatgcatgagttgtttcatcactctttgttcttgttaaatgtgtggtttttgaatcctgcctcctctaccttcagcctccccaacacacacaaagtcctgctaaatggggttatagtcaatgggcttcaggggacagtgacaagtcagagatctgaatgaaggagcacagctgggagaattggagttacggagttgacctgtggggatctgagtttcacgactgatttaaaaccaggagatctgtctatgatggcaatgcccaaagtctagaaggttcatcctagcaggagtaggacagtcagtccacaaaaatcccatgggaatgagattaggggagacaacattgatttctaattcaggtatttggagcaccaagggccccagaagtctctttgctcatgagttaaagcatctttatgctggaaaaaaaaaatgacgctattattcaaagaagtgtgttgtgggagggcgggggtgtacatcctttaggagagaaagtaggtcccgagtgagatcccaggagtaggaaagccagcactgtttgttttgttttcttctttccctcatgctcaatggtacaggaaacacaaggagaaaaggacccatcgccttcctccaggctgctgccaatattgtgtagagaagaatagctgaagaacatgaaaacaaatcttcacatttccttttaacagtgtgaactttgaaacactttctgactcatattttaaaatctcttaaatttgaattcaccttccttcatgttgtttttctcgaggcactaggcttgagtccaaaaatgtgtcaaccgactgctcccccagaattaagcagtcacaaagcctgggcccgcttctcccagctgagtgggcagggaaacctggctttgaccttcctacccttcctcaaagctgggcctcacctcaggcctgaagagccaagaaataaccattgtaaggggaagaggaggtatttggtaatatgcctcagcaagaggccattcattttgctacaagcagcagttgcctctggggtccctatttctgcacccctaaaaacatcattgctgtctcttaaggtgcttttggccacaggtggcaacatccaattcaactggctcaaataataaaggggcttttgttggcttggataactgaagtcctgagaccccttacttaaaggaccctgtttccctctggtgaccgccaagcattggtttcatccaaaagccagcttcctgcagggatggtggcaacaaggcttccaggagcaactgtgtgttgtgcttccagttcacagattgtgagaagagagagcttctgattgggccaactcaggacacgtgcctagcctcaaccactcactgtgctgggctcaggccgctgctgacaggctctggcccatcaggacccagcactgagtaataatgtgggaatacacagatcaccaccaaaccagtgcctctgtagttttcccagaggtatatttattcccccaaataacactcttgtaatagtcttctttcttttttgaaggtggagagtgtgaggagttctgtagtacatcctgcctactcccctgccatattttgggcgatgctattattcaaagaagtgtgttgtgggaaggcgggggtgtaccctgccatactttcttgcctttcccttaaagggtcagccctctggagctgagtctctgcttccccagatatgcactgactctgtctctccctttggggtcaacaagaggaatggagttcggactttgtcagacaagaggggctgagttaaggctctaggggaagaggtgaacacacctcagtggcctgttcctgcttccccaagggtcaagtgccttggcctcagacttcctgctggccacagtcaaactattttggttcatccacccagatgttagaaaaattaagtaccctaccctatttccccttgcttctgatttctcttctcatatcacagatacttcctggatgacctcacccgacctggcctccacagatccctgccacagatatcttgccagttctggacactctgttgacttgtgggcccatgtatcccattctctgcaggatgttccgtctggattttccgatgctgggcttgctatgtctccatggagctggttttcctccaaatgaggtcttccttggggatcccctttaagtcttgatgataaccattgctctcccaggtcctggcagtttgtgctgtgttcccatcaccctctggggctttctctggaagtgtggataggtgagcccaggtcttacaaggaggacagtctgcagcctattggagccatggctgccgtgggctgccccagcacccaggccagtgccctgtcttggggccaccccgctgctgtgtttgcagcaccatggcagttctttaattagaccaagcagggatttctcagacgggggtgggaggaggtgtgcgggtctattgggggaaactaggtcacctgaaaaccagtaatcaagagggagctgtcctcgagccccagctccaaggaacccagaggggcaaggtgggaggggctcgcggggagggccaagtcagagaaaatatgcctctggccccttttactggcccttgggagacattgttctcacctttctccagggagctgggcaactgcccttaattcctttgctgggagtagggaggacactgcagtggtgccttctgtctgcctggggcctgccaccctggggcccatggagggagcactgtgctgtgagtcaggccccaggtttagttactgctcagcctctgtatccttggagcaggtcacccactcccatgtgtctgtgccatccatccactgcacagggactgtgtctgcctttaccctgctgcctctctagccctgagcacaggcctggcatgtggtagatgccacctaaatatttgtcaaacaaaataatgagtttatatgagtgcttctcttgtaagattattgccacgaagatcaatggcaagatgggtttcccaaatatcagtcacttataagttttgccaacactaaacgccattgtcattaaatttttctttactatcaacttcctatttccaactgaaatagatttgtttaaaaaggaaattttatatcacaaccataaacaaacagtaactgtgaaaacaaatccacaggaaacaaaacaatgttattacattctatcctagatacagtggcttgcccaggccaggagctgaggcctgctttctctttgttttgaaggaggattggcatagttataaagatgttaagggtctgttagcattggactgacacttttctctggagaaagtctgaaagattaaaagagaagtgaaaagcctatataccctgctctctgtgtgggtccatgttacgtcaaggcttgttcctgtacttttgaaaatttccttggaatggattctccttccacacttagggaagcacttggctgagatgatggctggggaagttctttgaaagggataaagtgctgtaacagcgcaagtgattggtaccattactctttacttttagcatgtttttggtaccttccactcagaggtgatcagtcataataatgaagaaatgagtaactgtgttcaggatcttagggctgaaagacatctcacagaatacttaggccaatctgacacgggtggacattttatcctccagtgagtgacgaggaacttgccacctcctgagacagccattgaccacgagcacctttgtcgaattgcttgttggacagctctagaggccggtgtctgttcttggggtgcacacagctgcttccttgtacttccttgttcctccaaatgaggtcttccttgggggtcccctttaagggttgatgataaccattgctctcccagatcctggcattgggctgtgttcccatcaccctctgggtctcacgaggaggccagtctgcagcccattggaacctggctgccgtgggctgccccagcacccaggccagtgccctgtcttggggccgcctagctgctgtgttcaccctgctgtgtgttggggagactcacaggctctctttcctttcttgttcagagtggagctctggttatttggaaactgctgtctcattctgcctaagacagagcttgcaaactcaaatgacattggagctggcaaatgatgtcagttagtgagggcagtcaggcgggagtaatggggagcattggggactatggtaatggagagcgtatgtgccctatctaaaggggacagcccgactctacaccagttgatggtgatgccgtgtgagcccactgtggccccataccaagatgttctaagaaaagcagaccccccgatgttggatataaaatctccaagttgtaaatgtcagcaatgaattaaaatattttaaaacatggtgtggacttcgaccaaactaaccaacaaacacgatgtggatcacaggaggctttctggtcaggcctggcccacagccacaagtggctcatcactgccaacaagacttctctgctccttttgggctgggcagccacgtcctcttcgggccatgcttgtgcatgttggtttccagagttccctccattgtggtcagccactctgtacacctttgagcgctgcctaactccctctcagctcgtgtctgctcctttcaactggtgaaatcctacttctgcactgagattcaaatctgttgtcctgtattctggaaagccttccttgagaaccccgggcagactggctcttccactatctagcggtggtatgttgggtaaatgacttaatcactctgtgccttagtttcctcatctggaaaatgggcatgatagtacctagtactactattttattaggttactgggataattaaatggatttatgagataaattgacagacagaaggcagaggtggtccgcatccgtctctgaatcagggctcgtcacagagcaggacttcattaaatgtttactcactcgaggaagtggagtgaaataaacttgtgatctgctagctcccagagaggtctgactataataatgatattgtgtggttgtgaattgaactcttttgaactccttacttctaaaaaagcaaccaaaacatctatatctaagtggctaaaatagaaagcagtgacaatcccaaatgctgaaggggaactggatcactcacacattgctggagggtatgaaaccagcacagccattctggagaacagttgggcagttttcttttaaaagtaaacatgtgccaggcgcgggggctcacgcctgtaatctgagcactttgggaggccgaggtgggcagattacctgaggtcagcagtttgagaccagcctggccaacatggtgaaaccccgtctctacaaaaatacaaaaattagccgggcatgatggtgggtgcctgtaatctcagctacttgggaggctgaggtgggagaatcgcttgaacccaggaggcggaggttgcagtgagccgagatcacgccattgcactccagcctgggcgacagagcgagatctcaaaaaaaaaaaaaaaaaagtaaatgtgcaattaccatatgccttatcacttgtactcttgggtatttgctcctgagaaacaaaaacttatgtttacacaatctgtagatgaatggaacagccttaaactggaaacgatgcagatgttcctcaataggtaaatggttaaacaaattggggccatccataaaatggaatactacccagcaacaagaagaaacgcactattgatgcatgcagcaatgtggatgaatctcaaaggaatgatgctgggtgaaaaaagccaatcctcaaaggttacctgctatctgattctatttatataacatcttttgaaatgacaaaattctagagatggggaacagattagtaattgccaaggcagggacaggagtgggttggagggggagcctagagaaggagataggtgtggttatgaactgaggtggtagatacattgatacaattgcataaaacaaaacacatccaaataagtacatgtgaaactagggaaatcggcataagattggtgggttgtatcacgtcaggtttctggctgtgatactgtatagtagttttcaagatgctaccactgggataaactgggtgaagtgtacacagaatctctctgtactatttgttacgctccctgtgaatctacaatgatctaaaataaaaagtttaattagttgaaagtgcattgcaagtgtattcaaaacagaaatcaaaacaaaacaaacaaaaggcaaccaaaaccagctagcttgtctcccattgagccttgccattggcttatttatgctggaggtcacacccactcagaccctggaacttttgccctttgggcattgccaagccaaccccttccccattctgcctgcttactctccagtctccgagctgggagagacatgaagaacgatctggatctgacccaatctgagcacctgaggatttagcctgagccctgctcttcagcttctgtagaaagggcttttggaggggcgggtgacgcaggcgacccaggagattaacaacgcttcctgaaaccaaccaggggctaacccaatactctttgagacagtggaccacatcacacagatgtagactcctgccattctttcctgttacccaacaaccataaaccagccttgcctgctggttcacaaacatgctgcatttacatctccctaccattcctcctccaagcttgtgtctcattgtttagtgtcttaatgtttagggccagctcttttttaaaaaattattttatttttttgtagagataagggtctcgctatgttccccaggctggtctggaactcctggcctcaagctgtcgtcccaccctggactcccaaaatgttgagattgcaggcattgagccagtgcatccagccccagctctttttattccttgcacctgtaacttctgggaggtggataggacactttgcaggtggaggaacaggcttagagaggatcaagtgattgtcctaagaccctttccctctgtgtctgaaagttcatagagtccgtgctgaagaccagctggctttagactttgaaattttgttgacctcatgttatttgaaactcatgagagcaaggatgtaatttttttttaaaggtcatccaaagagagaaactttaactaagattttctatgtcccagtagttcagcagtttttaaacttttttgtcttaggatttctttagttccttaaattgagcatcccaaagagcttttgtttatgtggattatatctgtcaatatttatcataatataaatgaatattgaggaatttttaagaatagcattaattcctttaagataaaaccataaacccatgatatattataacaatataataatctataacatatttttattagactgttataaaagcataacatataatatataacattttgatgaaaaatagctatttttcaaaacaaaaaaaatttagtgagaaaagtgatgtttaaaaattttgcaaaattctttatgttgagcttagcagctggattcttgtatctacttctgcatttagtttgttgcaatgtcacttttcatatagctttgggaaccactgtatactcataagataatgagtagaaaaggttagtaatatcttagtatagttatgaaaatagttttgacctatggacttcttgaaatggtttcaggaattccctatggggttcccagaccacactttgagaagcactgcaatagtgtattgtttcttctggtctctttcttgtcctgtctgtcccatctccagtacaacttgcatcccatagtgatcagaacaaaagaggcttgagcagaagtgtcagatgttcataattctgaggccttggatgtttgtatagtctccagatttttgggggcctgcagcccccatcatgtcctgaccctccctgcaccccttctgattccagcactcagatacccaaatccttaaagtagggtgactctatacaagaaaactaaaatggcatggttcttgttaaatagctgtggctagagaggcagacaaccaagctatccaatagagctttctgcagtgatggatatattctttatctgcattgtccagtatgaagcatgtggcgattgtgcacttgaaatgtggatagtgcaaccaaggaattaaattattttactttattctaattgatttaaatttaaatagccacaggtggctactggctgctgcattaggcagcatagccagaccttgctgatacttacagggccactgtaaggatttgcacttctcttgaggagcaatggaaggaaaacctcaaaagcgtttcgaacacggggcgttgggggacgatcagatctgagttgtggagtctgacacatgtgttcatctgtgtctccctccctgccacaggccacaccatgaggccccagccccaccagaggccccgcgctgccctggcccccggtgcaccgtgctagcccccagccagggcgttggggagggcggtggccatggccagtcacgtggacctgctgacggagctgcagctgctggagaaggtgcccacgctggagcggctgcgggctgcccagaagcgccgggcccagcagctgaagaaatgggcacagtacgagcaggacttgcagcaccgcaagcgaaagcatgagcggaagcgcagcacgggcggccgccgcaagaaagtgtccttcgaggccagcgtggccctgctggaggcctcgctgaggaacgacgccgaggaaggtaggcccctctgtgccttggcggccacgcagctgccttggcctctgatcagggtttggaatccaggttctgtgcagtagacgtgtgggcaaggcaggtctgcagacccacttccaagttccagcagccccattcctcttaggaagtggacgttcctaggaacttcgaatttatcttagacttcttttttttctaagacagggtctcgctctgtctcccaggctggagtatagtggcgcgatctcagctcgctgcaacctctgccacccaggctcaagtgatccttccacctcagcttccctagtagctgggatcacaggtgtactgccaccatacccagctaattaaaacaaaaaaaatttgtagagatgggggtctcattctgttgccctggctggtctcgaattcctgagctcaagtgatctgcccgccattggtctcccaaaatgctgggattacaggcaagagccgcagcgccaggcctagactttttgtttaaacatcttcgttcatttgtttttatttatttatttatttagacatagggtcttactgtgttgcccaggctggtctcaaactcccagcttaaagggatcctcgtgcctcagcctcccaagtagctagtattataggcaggccaccttgcccagctgtatttttttgggaacaaggattccagcctttggctgaggaataccataataactttctttccctcccacaaatatttacagacaaccacaaatacttacagacaccttcttttgcattactttcctagatatagtggtgaacaagttggatctggtttctccccaccaaaagctcaatactcacaggatcttgcaattcataaagctctcctctgtgccagaccccatgcctggcaccctctgaatgctgttccgtgtattccgtgtatgtagcctttgctgcagtcataaatggtgtagagggatggactctgaagtgagactacctgaatctaaaactggctttctcagttccctacgtgagcttgacaagtagacaagtctcttccactctctatacttcgtttacacctctgtaaaatggggctaataagaaaatccactttaagggcttgctgtgaacattaagttagaaaatccctgtgaagttcctaaatatggtcccttatgctgaggaagtgattattactgttttattttattatattagtatattttatttacattatcaaaggatgtccataaagtctgaaaacagatatagacaatgctatctaggatattttcactctgtaaagtgaatgagtaaataaatataaacaaacatgtatacacattcatacaatctatgtttccagatttttttcttttttttttttctttttttttttgagacagagtctcactctgttgcccaggctgggcagagtgcagcggtgtaatctcggctcactgcaacctctgcctcccaggttccagcaattcttctgccttagcctcccgagtagctgggattacaggcgttcacctccatgccctggctatttttttaaatttttagtagggatgggatttcgccatgttggccaacctggtcttgaactcttgacctcaggtgatccacctgccttggcctcccaaaatgctgggattacaggcatgagtcactgtgcctggcctatgtttccagattttatggataccttgtacttgccatgtttaatttaattatattatttttgtgtctcatgagctagatatcatgatctgtactatgtatagtgctttaagagccatgtatgataacacccattttacagatgggggaattgaaactcagagaggttcagaaccttgaccaaggtggcagagcgggatcagaaccactggcatccgactcttgtcactgccctcatggccttataggtttgcttcctgttgtaggaatgaatggagaatccatgatgtaaccacagcccccttccctgggcttgttcagaggcggtctcgcctgctcattgtgagccaaggtctgtgcacctccctgttccccttggcgcccatggcccatccctgtataataagccttcctggctgtccctggagaggcctagccatgcttcctgggtccctgcacacaccttccagtcaatgaaagagcagagaggtgtggcacttctggcccaagagggtgctgggttttagtcaccttgctcttcaggttctagaaccctctgagaagtgtaattccacttccacctggctgcacagggctctaggaaacgagccaagaggcatccctggaaccactctgctgggagctgctccgctgaaagcctggggtgagcagcctgggtgaaaagagaggtggaatcttgggcttggggacatggccccgaggctccttcccacgtgcagtttgccaagtgatgcggcagccccatccccacgcagtgggtggcttgtcatgatgtctaatttttgttgggggcggaagttcatcagctcttctctcacccctcgttattgactgccttcttccctgacaaagccccattgcccctccctgaggggctctgtgcatgggctgcgggcttcagaccatcctcccagccccctgcccagcccctaccccttgctgatgtcttgtttcctggttagaaggagcactgggctgggagtggagggatcagtgccccgcagccctgcctgtgactttgagcagcttgtttcacctctatgggtccagtttttttgttttgctttgttttgtttttgagacgaagtctcgctctgtcgcccaggctggagtgcagtggcacaatcttggctcacggcaaactctgcctcccgggttcaagcgattctcctgcctcagcctctcaagtagctgagactacaggcatgcaccaccatacccagctaatttttgtatttttagtagagttggggtttcaccatgttggccaggctggtctcaaactcctgacctcaaagtgatccgcccaccttggcctccaaaagtgctgggattacaggtgtgagccaccgcgttcagttttttaatctgtaaaatcaggttttgaaagcttgccctcaagagggtatggcaagacttagacaaggtcctggatgtgacagttctttgaaaggttaccctgagacctgtaccagcacggtgataacgcactttattttgttttgttttttacagactttaatgtttttcagaacctaaatatgcacagatacattcttcttgtaaaaatcaatcaacgtagaagtgtacaaagtaaaaagtcctttctgtccctcccttcctccctctctccttcctcccctcctttgcttctttttgtccatccatcactactgttgttagtttgatgtttcttttccaggtatttttttcatttgcatatgcacttgtggacttaagagaaatatagagccaggtttcttttttaaaaagtttttacataagtgatggtatcctggatacattattctgcaattttctttttttttttcccatccaacggtatatcttggagacgttttcatgccagaacatgtacagtacagatctgtgccattatttttatctgctgtgtagtattccatagtatggattaccagaattttctaactagctccttattgatgcagatttttccagtagcttcgcttttgccacagtgaatgttttatttccatgtgcaaatgtttatcgaggacagatgtgatgaaatgaaagagatggatctgaaggtattaaatttgaatgagaaaagtgctagaccccatgggctggtccccctgtctctatggggcagccaagtgaggggaaggggccagaatactgtgctctgtggcaggctcgtgggttggttttagggtccacagttgcctgggtttggatgaggggtgtgaggctgccatcagtcagcccttgacctcactgggctatgctcagcttcctggcagcactacagagcctgctgctttcagcaggctgggaacggctgcttcttgctggtggagctggtgtttgggaggctgccggggtgttagctcacagtggcgtgggagcgtggggtggcagctcccccactcccctgagctcacagcagcctctgagtcaacctcccccacctgcctggggaatgtgagttgtttccagagaaaggcaggctaggaactcactgagtttcatcctctggtcccatattgcctttagactagtgtccttgcccttggacctgcctgagccccatgctcactgctctcactgccatcaccctctgccccaggcgacgccagctccaccaagatcctcccatattccctgcgttatcttacctccacacctttgtatatgcaattccctctgtctgggacactcttcctgtgactaactcctgtaaccctcagctttgagtccagcgtgatctctggggagccatctgtgagccttttcccggccctggttaaagtagcaactcaatacgtagctgatgtttactgagagacagtgtagtgtcatggctaggagcacagaccctgcagtttgtcctccaggattcaaatcctagctctaccgtttactagctgtgcatccttgggaaagttactttacttctcagtgcctccatctccccatcggtaaaaatgaggatgatgatgtacccgcttcataacgttgttggggggttaaattaagttgataaatgttgaagtggtatggtcagagctacgtaagtggtataaattgttgttattctacactattctacatttacgtaatctattattacagcatattctgattgtcatcattgttattatttatcaggtgctttgtaccaggcagcttgccttacatatgttatctcggttaatcttcacagcaactctctgaggttagagagtcaaaccccatttttaaaaaatagcttggggttcagtttacatattataaaatttgcccactttaagtgtactattcaatgattttcagtaaatttacagaattgtgcatccatcagccacaatccagttgtaaaacattgccatcgctgagtggtgtggctaacacttgttatcccagcactttgggaggccaaggtagaggatcgcttaagcccaggagttctagaccagcctggagagcctgtctgtactgaaaaaaaaaaaaaaaaaaaaaaaaaaaagccagccgtggtggcacttgcctgtggtcccagctacttggaaggcttaggcaggaggatcgcttgaatccgggaggttaaatctgcagtgagccatgattgaaccactgcactctagcctgggtgacagagcaagaccccatctcaaaaacaaacagaaagccttttcatcatcccaaaaagaagcctcatgcccatttgcagtgactcctggttcccagacccaggcaactataatctactttctgtctgtatagatttgccttttctggacatattatttacatggaatcatacagtatatgatctttgtgattggcttctttcattcagaatactgctttcaaggttcatccttggtgtgacatcatatatcagggcttcattccttttcattgccctgtagtattccattgtatagatattccgcattttgtttatccattcaccagtaggtgaacgtttggattatttctattttggggtaggatgaagaatgctggaaggcaaatttgggtacaagtctttgtgtggatatatgttttcatttctcttgggtcattacctaggaatagaattgttgggtcatatggtaaattatgtttaactttttaagaaactgctgtactgtcttggaaaatggcttcactgtgtgaattctcatcccccattttacagatgagaaatttgaagctcagagagactaagtcacctgccaaggtctcacaggttttaagtgtcagactcaatcccaggattcaaacccagatcagtttctccgaagcccatgtatttaaccaccaggcagtcctgtacttcctgcttttgttttcactagaaaactagagaaccctcagttgctgtactgatctgtgtttgttttggccttaggcatcctggtgtttctgctggcatcttgggccctttgatttggggcccccaagataaactctttagccccagatataacttctttctagggccacaatagcccagcctcccttgaaaccattgaatgtatgttaagttgttagagacttctgtttttctctcagaatgtgtagggttttctttatggaaattctcattcaaaaaatgtttgagtgattcttctgtactctaaatttaactcttattaaatttaatgatttttctcactgtaaaagttttcaaactcttttttaagcagtggaaacttttctttaaatgagatattatgcagaaacccaatatgtaaaacaaaggaaggagctgttctgactggggtcaggtgggtggggtgctcagtcatccctgccacctgcaaccccctcccccacccccaggcacagtgctggacacctgggccttgccaccaccatcttaaaccagcagctcatctacaggaactagctcagactttcacttttggtccttttaaaaagggaagtttcttttcttctaattattaaaaaaaaaaaaaccctgttattgttacagaaacttttagaagtacagaaaaaaagaagcattaagaagaagataaaatcacccatattccccctgaacagcaacaaccattgataatattttggtattgttgtgtcaggcagcgtcctgggaggaaacaaatggtgattttatatggggtgatttgtggaaagtttgataaaggggcagtttgtaaagggtttagggaagtggtcctcaaactttttggtctcagaggccctttatattcttaaaacctgagaactcctaaaagctttggtttagctgggttctatctacccatatttactgtattcgaaatttaaacggaggcattaaatatttattcattcattaagtcagaatgataaacacattatctgttggctatctgcttctgcgtagcagatgaactcaaaatttagcagcttaaaacaataaacatatactgcctcacacaatttctgtggctcagggatccagagcagctcagctgggtggttctcgttcaggatatctcataaggttgcagtcacttcaggatttacctggggctggagaatccacttccaagatggctcactggcatggctcttggcaggaggcctcagttccctgccatgtggccctctctataggacagctcgagtgttctctcagcatggcaggtggcttttttcagagtgagtgatccaagagatagaggaatccgcaatgcctttatgaccttgtgttggaaatcatgtaccatcacttctaccatcttctattcatgagaaatgactcactaggtccagcccacactcaaggggtggggaattaagcttcatcttttgaagagagaatttgtggacatgttttaaaaccaccacatgttaacataaatatttttatgaaaaattatatttttcaaaacaaaaaaaaaagcaatgaggagagtagccttgttttatatttttgcaaatctttttaagatctggcttaatggaagacagttggagtatcttatctgcttctgccttcaatctgttgtgatatgttattttggttgaagtaaataaagaaaatcttatgtagttggaaaagggaggaaatattttaattgctttttcagatattgtggatattctttgatactacatctaaactcaacaagtagtagtttcttaaaggttagttgcagtgctgaatctgaagccatatcaatttacatcaaaatccattggtctgtctggcattttgaatggttcttttacccatgtgtacttttttttaatgtaatatattggatctgttagaaaatattggttcactgagttacacagatcttccaaatgttgacacattgctttatacaatataagaaaatgtatagtttcaataacaatcttgccatacaattattcaggtactgggaaactgtaagttcgtggtagctataaaagttttctaaaatttggatttttgcttaaaagttcaaattctatcattggtaacaaatgctgtcagttgtgagaagatccatttgccctttttaggaaaaaaaacactgcctgttaaatactcaagtctgaataaccattgtttgctagacatcctttaagtaaaactagtgctccatgagagaagagactagcttagcacacagcttaaaaaatggctcaagtaatgcagttggagacaatgattattctttttttgaacttcccattttgtcacatggaatattaaaaggacatgtactcaaggattaaggtttcataaaattaatacattttattgctttatcaaggacatttttaagggaaactggtattgatttttttcttttgattgcacatacaaaacaatgaagatggtgattgctagtacagcttggtgccactaagttaattctgttaaaacaacagtagttttacccaccattgcttttacaccatcagtgcaaatgtcaacacagtggaaaatgcaagtaatttcttagtgttactgtgaaaattattttgatgttttaataccctgaaagagtctagagaccactttgagaaccactggtttatgggggtcaacaaggaatgggacaataccctgggatagcaaaagttgggagatcttacccaccccaccccaccccctgggcctgaaggagacaaggaaatgaacctactggaacctaaggaaggcaccgtatggagagggctacctaaaggagcagtggctgccactccatgcccctgccattctggtgctttcggtgacaaacctaaccagaaagcagaatgcaaggaagcctttgatgtagtgcaagtcaactggcttcctcaggcacggagaggggaagatctagagggacagatggggcagagagtgagcccagctgtcttcagcccttcggatctacacacaaacaaggagtgagtttgtgtacatttaaaaaacaacttttagggccaaatgtggtggctcatgcctgtaatcctagagcattgggaggctgaggtgggaggatggcttgagctcaggagttcaagactgcaatgagctgtgatggtgccactatactccagcctaagtgacagaggaagactctgtccctaaaaaataaataaacaaataaataaaaatgtaaaagtaaaaacaactttaaccctaacattcacttgtgaattcagcaaaattagtcatctgctagagctgtggtatcagggagagcctgtctgaggaggtgatttgggctcagacctgaatgtggaggagtctggaggaaatgtacaaaggatgtgtgatgggaacagggttggcgtgtttgaagacaggagaaagatgggaggtggaagagtagggggaggaggtggttgagggagagcatactgaccgtagaagactagagtaggaactgtacatttgatttcgatgaaaagccactggtggttttgaaaggggaatcatgtgatgagatacagattttgaattcgggatggattttcctggttgctgagtgcagaattgactgtagcaatctattttcgcagggctgtgaggggagcagggaggctcatgagaagccctcacagtagcgtaggtgagagcctatggtggtcactgggcgatgcagaaatcaggaggtggagcccacagggcttctgtgtcaagtgacagaggagggactcagtgatggcttttgggtttttggcttgaacatctaggtggatgacagtgccacattttgagactgggaagatcggagtaggagggaggaggggatttggagagaattgagttctataggactgtccaagttgacatgtccttttaacatccacatggagatcttgaagaggcagatgaatatgtgagtctggagctcaggggagatatcagggatggttataatacttgggaagtcatcagcatgatacaagtgcagtattttcaaaaatgcaggactgtaggaggtcatctaggaagcaagggtagttggagcagagaagggatcgcagagaagggatcactagagaaagctctgggacacctcaatagctgcatgttgacccaagaagaagagaacaaaggagaccagaatcatctactcagaaggtagaaagaaaaccaggaatagtgtggcatctcagaagcctggaagaaaggactgtcagctcagtcaaatgctgttgaggggttgaatattttgtcttatctttatatactctttggaaaaagagatttctaatgatgacctcatatatcctatcatggatgttccataatttatgcagctactcccttattattgcattttgaggccattcccaatttttgctactataaattatgccgtggtgaatatcaatgtataaaagtatttggttggccgggcgctgtggctcatgcctgtaaatcctagcactttgagaggccaaggcgggaagatcacttgagcccaggagtccaagaccagcctaggcaacatagtgagaccccatatctacacgaaatttaaaaaattatccaggtgtggtgacgtgtacctgtggtcttagcaacttgcggggtggaggtgggaggaacttttgagcccaggaggtcaaggttgtaagctgtgattgtgccactgcactccagcccaggtaacagagtgagaccctgtctccaaaaaactaaataaataaaataaaaataaaaagtatttggccatagctttgattatttactaggtagattcctagatgttcattggctttgaggtctcgatataaaccactcatttgactaccagagaggttgtatcagctgtgtgtatccatccctgctatctccccacctcatcactacctgccacatcaatgctggatgatgacattgaaaacacacctttgctgatatatttgatatatggaaaatagtcctgttgtcttaatttgcataaaatcgagacagttaaggttgaatacctattcataagcttactggtcatctctctccttctttgagttgtctagtttgtttttttgttgttgttgttttgagacggagtctcactctgtccccaggctggagtgcagtggcacaatcttggctcactgcaacctccgcctcctggattcaagcaattctcctgtctcagcctcccgagtagctaagattacaggtacccaccaccacacccgggtaatttttgtatttttagtagagatggggtttcaccatgttggccaggctggtctcaaactcctgacctcaggtgatctgcctgcctcagcctcccaaagtgctgggattacatgcatgagccactgcacccggactatttgttcattttttttactagtgtgcttcttattggtttcaatgattgtgtacgtttatgtttgtgtgtgtgagaggagacagggagaaggtgagaaagggggagaatgacattggagggagagatgccaactctttgttgtcatgtatggttcatatattttctgcagtgcgtgtatgtgtttgctttaatgttttgtttatagtaattttttatgctttggagttcttattttttatattgtcaaacctaatgatacttgatttctttttttaaaatcattttattttttttatccctttaaagcagggaccagaaaactgtggcctgaagtccaaatcttcccactgtctgtttttgtaaataaagttttattggaacacagccatgcccattcatttacatattatctatggctgctttcacattacaatggcagagttgagttgtaacagcgaccatgtagcctgcaaaggttaaaatatttactttctggccctttatagaaatactttatgggctcttgcactaaaatgtttcctcatctagtgatgtatattaaacctatgttttcttctagggttttttggccttatttaaataaataggtagtatttctggacttcattttagtatagagtactaaatgaaaatctgtctatattttgtttccaaagcatcagcaattgtcccaacatcccttccttccctacaagtttgtgaggccacccttgtactctagagcctcatctgtaatgaagggtaactctccaacctgtctattctgttccagcaacctattttggtgccagttacatactgctttcatccttgtaggtttatattgtggcttaatatgtgataaaacaagtttttcctcagattactcttttttttcaaaatgttcctggttattttcagctgttcacataatatttaggactgtttggtcaagttttccctccaaacctcaaaaatagatttctccaaagctttgcagggacatggatggagctggaggccattgtccttagcaaactaacacaaggacagaaaaccaaatacagcatgttctcacttacaagtgggagctaaatgctgaaaacacatggacacatagaggggaacaacacacactgggtccctattggagggtggattgtgggaggagggaggagatcaggaaaaataactaatgggtactaggcttaatacctgggggatgaaataatctgtacagcaaactcccatgacacaagttgacctatgtaacacacctgcacttgtacccctgaacttaaaagtttttaaaaaattaaaataattaattaatttggaccaaagtgatatgtttatcatactgagtttttctaagcgggcaaatagcacatgtctctgttaagcatgtattctttcttgtcttttaggaaagctgtagggttttttgtttgtttgtttgtttttgttgttgttactgttttcgtataagtcctgtttaatgtcttaaaaggagggctttgggttttgtacattaatgttataccaagcgaatttactgaattcaccttagtcttggtttttcagtgagttatcttgggggtttctatttagaaaagaacattatttgcagatgataaggttgtctgatcattccagtgtttcagtaagcctggagatctgagtcctatccagattctatcctctctccccttctctccaggctaactacttccgttccttttcatattcttttatgacatgtggctttgagatttgtgaccatgctctactctgtctacgttcttcccaaagtctgatctggctcactctggagtgaatggaactgtcactttcctcgttctggttgcttttgcctgttagtatgacttaagtttccattagctttttgggtagctgctgttgactcatattgaatttataagaaaacaaaacccccaagtcagcttcccattaatgaagctacattttccccatcctgatttaaaaacaacaacaacaacaacaacaaaaaaaaaacaaaaaactgtttgttgaagcataatcatcagacagaaaagggtaaaactagttgtattttcatgtgctgagcatacccatgtaactaatcagcactcagatcatgaaacagaacattaccagcaccccaaaagtcttcctggacacacggttgatttttaacattgaggtcaagcgctgcatttatcttgttgagttttgagcccaattatctacctgttcagctagttttggattcttgaatgatacgttaggacttttgtgtcaccagtgacaaaaactcaagctaacaaggttaacaaaacagtgttcacgtagtggagagttcaaagatagcacagcttcaggcacttgtggatgcatgagactaccaagaaatgtctctgagaagacgactatcagcagcttgaaatatatatcctaaatccttttggcaacctcagtaagaataatttattttcccagaagtgtcccaggctcaacaagtcccagaatggaacctcattggctatgaggtcgattcctgagtcaattgtaatggctagataagggaagcaatgctatgattggtctggttggagccatatgcccactcctggagtctgcttctcccaaacacatggactgacacttggtattatgttgtacctacccactcccccaaaaatattgggatgatatttccagaaggagggagaatggatgcttgtcaggccataattaaatatattcacctcaaatgaaatattcaccggcagtttctactccatatcattcataattgcaataaggatttgccttctagaccagaattgtgcaatagaatttttttctgatgatggaaatgtgctgtccaatacaatagctgctaaattttttattgtatttagttagaaataatgtagtcaactgtggctaagctagaggctgctgacttagaaacacagtcataggccattatccaaatccctgataaaaatgttgaatagggcccagcgtggtgctcacgcctgttaatcgcagcactttgggaggccgaggtgggcagatcacctgaggtcaggagttcgagaccagcctggccaacatggtgaaaccctgtctctactaaaaaatacaaaaaataaccaggtgtggtggtgggcacctgtagtcccaggtactcgggaggctgaggcaaaagaattgcttgaacacgggaggtggaggttgcagtgagccgagatcatgccactgcactccagcctgggcaatagaacaagactccatctcaaaaaaaaaaaaaaaattgttgaataggtcatgggcagagatgctgcctggggccacacccccggagaccttttccagattaatgtatcaaagtcaactactgggaatagttgtgcaactgaaatgaacttaactacattgttatttgcagttggtatgtgggaacagtagcaggagtctcgacaattaaaaaacaattaaaaaaaaaaaaagctggctgggcatagtggctcacgcctgtaatcccagcactttgggaggccaaggtgggtggatcaccagaggtcaggagttcgagaccagcctggccaacatggtgaaacctagtctctactaaaaatacaaaaattagctgggcatggtggtgcatgcctgtaatcccagctactcaggaggctgaggcaggagaattgcttgaatacaggaggtggaggttgcagtgagttgagattgcaccattgcactccagcctgggtgacagagtgagactccatcttaaaaaaaaaaaaaccatctttcctacaaaacttagaagacgatttctctctgagggttaaattacaacaaaatgtgatggatcagagtagcaattcatgcacagacatttatggaacatagtctggacatcatcaggctggcattggttgttcagtggtgaacaaaacaaaatgggccagaccaccttggagctcagagtctagcaaagtcattgtgaagagagcatagtattaacatgcttaacaatggatggtgttattataaagaaggccttgctgggcatggtggctcatacctgtaatcccagcactttgggaggccaagacaggaggatcacttgagaccaagagtttgaaaccagtctgggcaacatattgagactgtatctctaccaaaaacaaaaacaaaaacaaaaacaaaagccaggcatggtggtgtgggcctgtagtcctagctgcttgggaggctgaggccggagaattgcttaagcccatgtgggcaaggctgcagtaagtcacaattgtgccactgcactccagcctgggtgacagagcaaggccctgtatctcgcggggacggcggggggggaaggccttgtcaagaacagatgccagaaaaagggggctaggagatcatttatgaacaattctatttaaatatcgttcaagggagaggacactgtgagcaacaactttggtgattaccatcccattgctaaggacaatctgattatggaaaaaggggacttcaacccatcttggtgatcttggcgtaatcattaaacatgatgattatgtacaaccttctgattataatttggcgtcccagccaggtctgcctacaagcacagaatgagttgaccgtgcttaactgaatttcagacatgcaaggcaattattctcctgtgatcctggcattgtgtttttatgcagcagcctcataaacttggatagtatgagactgctcttgggagaagaaactgctgttggtaggctggtcaaccatggtcgatcaccaaggtgataccatcctagggatcttggggatatttaaccaattggaactcccttggaacctcccccaaatcaaaccacaatgacactcaaccagcatttccccagggtgctaataaggaggtgtatgagaggcttgtcaggtgctcaatggagtctagacattttctatctttgacatttctcagtgtagtgaacccattgagaagatagatgaggcattgctagcatgattgattcttgcttggcttctagggaccactgtttcctttttttttttttttttttttgcggggggtgggggtagcatggggggataaagtcttgctctgttgcccaggctggagtgcagtggcatgatctcggctcactgcaacctccgcctcccaggttcaagtgattttcctgtctccgtctcctgagtagctgggattacaggtgccaaccaccacgcccagctaatttttgtagttttagtagagacggtttcaccatgttggccaggctggtctcaaactcctgacctcaggtgatccattcccctcggtctcccaaagtgctggaattacaggcatgacccattgcgcccggccccactgtttcctttctaatcgagtgagaaaatggtcagtatttctgtcaacaaaattcatgaggctctttgtacgcacagacttcaggcctttctctcaacaatcgccaaagctggagcatcacatggaggaacactggggtttgaaaaacaggaatgttccagaatcttctcagagtattacattttccaacatgtccatcccatatttgtaccaacaaacagagctggtcccactgccctcatcctttgtctaccatgttaggctgaggaagttgcatgcagagcagaggtgaagactaagagaagaagatacaagaaacctgctgagtaggggagagggaaatggtacctctgccagttatgctggaaaagctaaatgaaacccaaatcttgatggaggtgttagggttttcagtctttcaagagaagctcaggacacaggctttttggcttaaggaccccaaatttcctgggcaccacaaaagtagtaacggcagtcctccaggtgaatcagtgtcaagagctagactgtaatcacttgccttttgttgcattacaagccactcttgaaacacttagtggattgaaacaacaacttcttatttctcaatgattctttggcttgactgggcactctttctgctggtcttccctgggcagttcttctgctggttctgcctgggctcactcatgaggctacaggtagctgctgggtcagccagtgtctggggctcagctgggatgacctggcctctctctgcctgtggtcctttatccagcatgatggtctcagggttccaagcaagtaagccccaatgcacaagtatttatccagcctttgcctgcatcgcgcttgctcatgtctcattggctaaaacggatcacgtggccaagctcagagtcagtgtgggaagagtctatacaagcgcttgggtactgaaaggcatgattcattgggggccattgttataatctaccacacattctagactttgctttgctttagatccgaattctagcaactcgatgtgataaccctgggcacatcatgttgctcgaacactgtaattggctattgatgtccctggaatgtctgagatgtatggggtggaccaaacactgcctctctctgggaaccccggactttgggttgagaatgcctagtgtttaggtggcattgactctaaaaccatgtggcattcagaattcagcactgggcaatggcgcatatgctgatttaattttattagcctattagctgcatagacacaacagtgatttatgtgattttataatattatgttgaaccttcaataattgggattaaagtctggattgatgttgtaacagaaacaggagtagaaaaataatcatcagccagatggaagaaattattagttcacaaatgcagtgtgctcagtaataaaatctttcaaaatgtggatgacataggtgcaatagaatataaagaggccttcagtggaaagcttgggaagctctgcagagatgcagtggaccttgaaggttaagaatatggagtcagacaaaactaaattttaatctctattttgtgaccttgggcaagtaacttaacctcttttggactcagattcctcatctgtaaagtggagagaatgatgcagggaagggaggggagtgggtcaccgtgcagattcatggaaataaaggatagacagtggacacggtcagtttggctgttactatcatctgccagtagcctcagttacaataagccagaggcaagattaacatctcttcctttttctttctaattcttctgctccccacattgccataactactcccattttctctatctctgtttactcaatggcggccttctatcagtcagtcacataaaagtattcttattgcagtcatttacactttagtatgaatgagtcagcacttttttgcagcaattttcattggaagccagtgggaagtgaaaggctttggccacccctcataatatatgacttaaagcctgcttgcaatagagagcccttgcagagtctctaaaagaaaaggacctgccccctgaagaacttctgagaccatagacctcatggtgcccagcttttcctggttgccatgtgtcatctctaaagacagccatgaatatctgttttggttgacttgagccatttgaatgtctaaaacccatcttaataacaaaagctctttggagggaccctaattaacttctttaaattgctttctctaaacttttggaattaatacaatctgttcccttgttattaaaaaaaaaaaacaaaaccctaggatacttcgcaaaacttcccccaagttacttggcagctaacattttgtcaaggaggcatggtggccaaccttcccctgaatgggattggtttctatatagtcattccttccggctcatgactttcttctccatttgctgcccacggacgccgaaaataacttgttttctggcaagcttgggatgagattccttatgatttaatcagatccataatgaagctctcccagctttcaggagaaaacatcctgaactgcagggctggttaagggcagggccctggtgaagaggaggagccccctgcctgagcagcacatttggagccaggagagctgcaacagggccatgccacccacccagtggggtgcccccattgtggctgagactcctggcagtgctccaaggtgtgtaccatgtaagctgtgccttcccactccctgcagcccagactaaaggcctcaaagataataggcaggacatcgcatctgtaaataccagctgcttggtccaggaagagacagtttcctacatatatatatatatatatatatatatatatatatatagagagagagagagagagagagagagagagagagagagaaggaggaggagagagaccaggacagacttgccctggctgaaaccaggattcccttgatggttccaaactgatgttaaattagaggataactccagatatgataacaagctgggggtggcaaagtaggtgggtaatcagggagcatctgagtaggtgacagagaattggataatgaagaagcaggtaaggtgatgggaagtagctggggcaagagggagtagccaggcaataaggcaaagtagctggagaatgggagagtaacttgatgatgaaggccaggcacaaagtgggagttactgcagtggggcaacagaagacagccccagacctggggtagaggctaccctgacctgttccagttgccttcattttgccacttccttaggtcttgctgctgagaagtaaactcagcctaagtctgtaccagttagctggaatctgggctgttgtaaactgttgtggtgaagctccctgggagtgaggctgaggttgtagcagtagcaggtaggtgtggtgagtttatttccttgagggaggggctctctcttctctcagcccctcaaaggatgggtgaggttgcctgccagaggtcctggcacaactcacatctgagcccccaatttccccatcatcaccttcatccttctctcaaccagatttttattggataacttaagcaccaggcattgtgctaaaaatctttctatgcatcaactcattgcatcctctcaacaactctataaaataggaaccgttagtaaccccatcttacaggtggataaactgaggcttaaaaagtctaacaacttgcccacataagaggcgtagccaggactgtctgacttcagaatctgtcctctaagccttatgccacagtcatggttacttctacatggagcatttctccttcaaaagctcacccctacccattcactatttaacagcacttaacaaggtctggtttgggagtgaaagctcaggtagggtgtcctggttgggtaaggagcctcagaaacaattcaaatgctcatggtccccacctacggtgggcacagccacctggctgcccttttccaaacccattgcccgtgaggtctgttggataaagtcacagtttagaatcagtcttccccagggtgcacccaccactggcaatcagacctcatttgcactgagacatttatagtccacagtgaatttccattatctatatagaatgagacaaagaaacagaaggctcctggctttaggaagtttcttcttctctcttctgtctgacagccatcctttccagcatgtcttgggacagatgccatgtcaaggatcatctagatacttggaaaatattgtataattccaggctttataattttttaattaaaaaaattatgtttggatcctgaagagcctaactgtattccttatttaatgaaagcaatgcaatcgcattgtcactggtgacatggtccctcatttaataagctgctggctccaagataagccatccattccaggaggttcttgattggtaaaattgttttgcactaaaaggagcttaaggttaagcactaattaatggaagggggttggattttatatagatagatcggtaggtaggtttggggacatgtcaaatacaccatctttgtctctgcagctgaaaatatatatttaaagcccacacaactccgtagatttcttaaagctccatttttggcaagtatattccagtcttggtgtgctctggttaataagcagcttctgactcagggcactcagtgactgatggttgcattgacccaagtatctctcaggacgcaactgatgtggtcaaaatcccccaggtggtttgagcccaccagtctttctcggtggacatggcttgagaacttcagttgggcactaggacactatcttatctgaggcggccagaaaaaaaattatagactgggtggcgtaaacgatagaaacgtatttccttacagttctggaagccagaaatccaagatcaaggtgccagaatggctggtttctcgtgagggctctcttcctggctttccacctcctcactgtttcctcacctggtggtggtttgggggaaaggagactctctggtgtctcttttaaggacactaatcccatcatgggggccccatcatcatgacctcatctaaaactatctcccaaaagtcccatctccaaattccatcgcactggggatagggcttcgatgtatgaatttgcggggaacacagtgtagtctatagcaggcactttctgtggctgggcaagacagctgtcttctctgatgtccctggggttctctgtggtgctggagaaactgatgggggaattctctggaatttgtgtcctgggtggacacaaaggcctcaaaagctcgaagcccattcccgtggcctggctgcattgaaggaaactttactgctgattggaagagctatggggtcttcagaccctgccagaacacagggcatatcattttgtaggggagagccctagtcttggaaaacttcctggtggaaagcaaaggaaaggaggcagaggaaaggaccaaacctgatttattgggtaaatattaataaatgaatgtacctagtggctgccatgctcttctggcaatgagattggaggaaggggatatgattcagacccataaaactctggagagggcagtgggcttgtttaccaaatccctgatgctacccagagaggtgcccaggaacttgaagcaagtagggatgtagaaggaacctgtattattagggaggtgtcctggttctctattgtcacatagaaaagctattctaaaatttagctgcttaaattatctcacatgggtcaggggttcagatggagcccagaggggaaaatttgtctctgctccacaacgtccagagcctgagctaggatgactgaaacagtcatcctgtagtcccagggcctccccatgtagcctctctacgatggtggccttggcagagtcagacttcttggatgatgtctcagagctccaagagcaaatgtcccaggatccaggaagccgccagtttcttgagaccttggaacagctaccaagccgaccccgacttcagtggaagggaccaagaccccaccttctgatggcaggagtttgatggtctccactggggctgtctttaaactgccatgggaggctacctgctgcggcattttgaagtttatctcttgctcatgtgacagcccagcacgggtattcatgcttacttcagcctgtgggtggggaacggggagtgactgctagtgcgggttccttttttttttggcggggtgggggagggtgtgtgaaatgttctgaaatcgattgtggtggtggttgcaactctgtgcaaccatcaaagagggcagctctcttcaacacaatgaccccatgcctaggcttcttccatcctatggctctgcccgctagatcagagctgtccaatagaaaaagaattcaagccacatatgtaactgtatttatttatttagagccaggttcttgctctgttgcccagactggggtgcagtggcaaaatcatggctcattgcagcctcagactcctggcctcaagctgtcttcccacctcaacctcccaagtagctaggactacaggcacatgccaccacacctggctgatttttaaattttttgtagagacagggtcttgatatgttgcccaggctggtttgaactcctggcctcaagcagtcctaccacctcagcctcccaaggtgttggggttataggcatgagccactgtgcctggctagtaattcttaaatgcactagtagctacatttttaaaaggtaaaaaaataaacagttgaaattaattttaataatatattttatttaatccaatatatccaaaatgtcatttcagcatgcaatcaatataaaacttattaatgagagattttacattctgtttttttcatatcttttacatttatttatttatttatttggagatggagtttcacccttgtcacccaggctggagtgcaatgatgcaatctaggctcactgcaacctccaccttccgagttcaagtgactctcctgcctcagtctcccaagtagctgtgattacagtgccaccatgcccagctaattttgtatttttagtagacatggggtttcaccgtgttggtcaggctggtctcaaacttctgacctcaggtgatcctcccgccttggcctcccatagtgctgggattaaaggcatgcgccaccatgcccggctaattttgtatttttagtagagacagggtttcaccatgttggtcaggctggtctcaaacttctgacctcaggtgatcctcccgcctcagcctcccaaagtgctgggattacaggtgtgagccactgtgcctggcctttttgtatgtttttgaaatctgaaattgatgcaccatatgttgattcagattagccatatttcaagtgtcatggccacacatggctcgtagtcaccacatggggcggtatagccctggatcctcagagttccctcattcaggttggaggtggagattgcaggggagggatctgcaggccagatctggaagtggcaagttcagcccgcattccactgaccagaacccagactgtggtcgcacctttgcaagggagactggaacagcatctagctttgtgcccaggaggataaggaagcaaggtctagcgaacactcagcagagtctctcccagcagccagcaattttctgtgcatctactatgagctagtcagcctggttggcaggctgtatctaggttttgagtaaggtggaagaaattttgctttatatactggtttcccttagctcatagttcatactccttaaagtggcttccagggtcttccatgctaacttgcttcccagtgctcccaggggccccctgcaggtcccaatttgcacactgttactcatgctcttcctcccactgggagtatccgtgttctcctccagtagtgcccatcttccctgattctccccattccctgggtcctcttcagtctcttatgctccccttttatgcccttcaccatatacagacatacaggcagcatgagtggagaaacatgcagttcagaagcagctgggcctggattccagccccagttctatgacacacctgctgtgtgaccctgaggaaagtcactcaacctctctgagtctcatctgtcccctctgtaaaacggaaataaccagagctacctggtgggatgttggcccccacctgtcccagtgctgcacagctgcaggccaaagcccaacttggtatttgagctggttctgacctgggcaggccctagaagaggatgagaccccttcccactgagggaggtagatttgatcttgtgatgagatgtccttgtctatgagttgcctgggagagccaagactcctgtgtccctccaaagtgatggctccacctggggggctaggctctgcctcagggtcaccatccaacttttaaaacctttgtctagaagaatctcagcatggttaccataggaccctgacctgtccgttttcaccctgggatgggacatcttcttcccccccacccttcagccagcctgcatcaatctgctgttgccacttgaggatctggatggtgggccctggcctgctgcagttcttctttttttttttttttttttttgagacgaagtcttgctctgtcgcccagactagagtgcagtggtgcaatcttggctcactgcaacctctgcctcccgggttcaagcgattctcttgcctcggcctcccgagtagctgggattacaggagcctgccaccgtgcccggctaatttttgtatttttagtagagacagggtttcaccatctcggccaggctcgtctcgaactcctcagcttatgatccacccacctcggcctcccaaagtgctgggattacaggcgtgagccaccgtgcctggcctacagttcttcttttgcttctggtctcttactggactcttgtgaggctgacaccagccctgaccaagcccagtctccttggaggagaggcccaagtccagcccacaactgtgtagggccccccagccttgttgcctcccatgcctggcttcttgccctctctctaggggcagggcatgctgggctgtcttcctgaagcacccagaaaagttatgaggaggggacagttaatgccaggtgaccagtgaccctgagccagtcctcattgctatgttcagaagagacaaaggcaatgttagcatagtgaatgttgaactgggctgggtgccgtgaaaatgatataaggcagaaactataaggcggaggatactattatacacccattttatggaagaggaagctgaggtgcagagaggttcagagacttgctcaggtctcacagctccgagtgctcaagttgaattttgactcaatatcacatgaatgcccccgacacaaccctaccacctaaaaactaaaaggaagatatgaaagcaaatgtagagagaatatagctagtagccagaggtaaagtgaagagtcccaaagactcagaaataaaatcactgtctgaccctttgtccagaaaattcctgacgtaatggatgggcctcatcatcccgagaaacccagagtcagagtcaggaataagcaggtccttgaggaaatgaggaatgggatgaagaagaatgttcaggagggagagcatggccacaaggttgactgtggcctgccctagggtggggagtgcaaaagcaagatcttggagctcttgggttccttccctgctctcctgcccactccagattccatcagttatggcctttggaggctgtctgatctctgccctgcttcctggctcacccagccactgcttgtcaccaattcagcttcctgggtgttctgatgttcgaaagagggtgtgtgaatggtggacgagaacatcctggtctatatgaaggagtgggcttcagggtcagtagatacaatggtccccctacttagttccctggtgcttggagaccatcgtggtgctgggtcatgaagcagagagaacatttgtgggctctcccagcccagaactgaagcttctgaaccatggtgactctaggaagcccaccacccaggagtcagcctgcctccctggatgcaagttgcctctggtgcttacaaaccacagcacaaaacacaaaaaatgtggaaatggggacgttcccagaaggcaacttcctggggctcagataaccctggtctgaccgcagagacctgatgcacctcgtacttcccctcctgtctgtgaagcatgaacttggctggtgtcatgcctctgtgactcaaagatccctgctgacaggtttaactccctgcatggctgagcccctgcagagcccaggaccactccactaggccaaagtgaggggtaatggaaatgaaaactttccacgtttccgtgtctgtctccccgtagcctgagcccacaccatctgcctccttttactctggcatggatgatgggaaggaccaggccctttccaggttcctgttctggctcctctgtacagcagctgtgtgatcctgggccagtcgctttgcctatctgcaccccaggtttttcatctgaacagtgacggtcacagtaacacccacctcaagggaattgcgagaattaaatgaacctgtggatgtcatcctagaacagtgactggtatatagtaggtgctcaatagaggttaattcccatcttttctgctggggggcccagatgagatgaaggttttctgtttaatgaaaacgtgcacaaaagcccagcagcgctattcctagatatattcccccaagagaaatgacataagtctacataaacacttgtctacaaatgttcatagccacatttctcacaatcaccccaaagtggaaacaacccaaatgtccatcaactgatgaggggatacatggaatgcagtctagccatacaatggaatatcattctgccataaaaagaaatgaaggactgacacgtgctataccatggatgaactttgaaaacactatgttaagtgaaagaagccagacacaaaaggccacgtgttctagaactccactggtatgaaatgtccagaatagacaaatctatagagacagaaagtagattaggagttacctatggctcggggtgtggtggggaatgaggagtgactgctaatgggtatggggtttctttttggggtgttcagatgttctaaaactgattgtggtgatgattgtacaactttgaatacaattttaaaaaactgaaatgtacatttttaataggagaattgtatggcatgtgaattatgtctcaataaagccgtttaaaaatgaaaagtcagggagaggaagagaaacttactagcacttgctagtgccactggcttaaattgcttcctaaatattcacccatttcattctcacaacaaccttttgggaggtccttttatcaccccatttttgcagttgtggaaacagaagcacagaaaaggtgaagtaacatggccagtcacacagctagttagcagacctggaatttgaactcaagcagtggtggtttagaactgaaccgccaccgtaagctgccccccactgcaaccagaggtcggacttcatgtataacagagggagtcacaggacctcattcacccagaaagaccaccggagtcccccacctctcacagagggatctgccaggacttgggtgcacagggtgtagggcctaggtaccagcagagagccaggctctgagaggcagacaagaagtgggtgtttctgggtgacactgtgggactaacatgtctctgacccagtttgagagtgcctggcccctcctggagctggagctgcagaaatcgatttgcagactgccggtttccacttaattagcatggcctccttctggctgggaaaacaccattaaatgggctgggttggcctggaatcatgccggtggcctcggccctggttctctggggctatctgtctcttgggctctgtccccttagccaggctggaattcagaatggcccgagtttctggtttggagtatgaggcaaattctacccacgtccaggcccaagtgttagatgatcctggggccccggttgagggaactggaaggagaaatagaggcttcactcttcatactctgcctccttgggcccattggtcagtgtcctggcacacagacctctgacttgcacagggcacctaccctgtgccatgtacactgctgcattctttttttttcttttttttttttgagacggagtctcactctgtcgcccaggctggagtgcagtggcgcgatctcggctcactgcgagctccgcctcccaggttcacgccattctcctgcctcagccttccgagtagctgggactacaggtgcccgccaccacggccggctaatttttttgtatttttagtagaaatggggtttcaccgtgttagccaggatggtctcgatctcctgacctttgtgatccgcctgcctcggcctcctaaagcactgggattacaggcgtgagccgccgcgcccggcctgctgcattctttagatgcgtcacctggtacaccttccactcacgtcctgcacaggtgggctccacttcacagatgaggagacagaggtgccgaggggttgtcacttactgaatgttcccatggcagtaggtggcagggccggattcctatctccgggtctcctgcttctggtgtaatcccagcggcccctgcagagcctgcctctgttttgagggcaccactcatcaccttggctttaaaaagttgaaaagtggccaggggcgatgcctcacacctgtaattccagcactttgagaggccgagttgggcggatcatgaggtcaggagttcgagaccagcctggccaacatggtgaaaccctgtctctactaaaaatacaaaaattagccagacatggtggcgtgtgccagtaatcccagctactcaggaggctggggcaggagaattgcttgaaccctggaaggagaggttgcagtaaggtgagatcatgcccctgcactccagcctgggcgacagagtgagactcttgtctcggagaaaaaaaaaattaaaaataaataaataaataataaaaattcgagaggtttgatttctgcttctggtttcagaggaaggaaaatcacttaggcaatgggcccctggggaacagaatagctcctaaatcccgggtgtgctgtcctctgtgggctgagtgtctgtgcagcgggaagaaggggcacctctgggttctaccccagacttgctgcatgaccttcagcaactgacttgatttctctgagtctctttccctcatctgtagaatggggcacagtaacagcctcctttgcaatgtggatgacacagaatgccccggaaggtgcgttgacacatggtcagcgtcccgtagcagctgcctgttatctcgccagcactcttgtggctagcccttcagaaacgaacccaaagaaggcctgcttgctttttctcacaccatggatgtctggggtgtgaggcaaggcacatctttttcccatggaggggatacagcccgccatgcaggagatggcctgggatggagggtgggtctcctgggcctggagctcagcctctgtctggtgatgtcaggaatctgcactgtggagcagaggcaccctgcagtgtgcaaagtactggtgttttcttttaaattgaggtaaaactcacaaaacacaaaattaaccatttaaaagtgtacaatttagtggcatttaagtaccttcacaaagctgtacagtcatcacctctgcttagttccagaacattttcattgtcccaaaaggaaaccctggactcattagcagtcactccccagtttcctcttccccctagcccctggcagccgctaatctactttctgtctctatggatttatctgttctggatatttcatataatatgtgacttttcgtgtctggcttctttcacttggcgtaatgtttttcgggttcatccacgctgtagcatgtgtcagtacattattccttttacatctggatcatgttacattgtgtggatagaccccctgtcccccgccaaccacacacacccaggctggagtcaccctaaggtccacctctgcagtgatggttaaagcgatgtccccaaagggcactgtggtcttggctccttgatctcaccagccattcatgtccaaacatcagcctggtgctgatggggacgaggtggggagtgattctgggggatggggatagttaaagatccaccagggacagatgagcttcctgtgtggtccaactcaggagtcaccagggtccatggttcagatgctgggatctggagcgagaccatctgggctcaaatcctagctctgttgcctattgggtgaacttgggcaaaccattcaatctctctgtgcctcagtttttcttttggttaaatagaataataatacactacctacttaaaagggttgtaccagagctaaatgaagccttgctttagcacagtgcctggcacagaggaatatttccaaaatatgttagttgtccaaaatgtgttagcatttccaaaatgtgttagctgtcagctcttgtgattctttgattcttttttttccccccgagatggagtcttgctctgttgcccaggctggagtgccatggtgtgaacttggctcactgcaacctccgcctcctgggttcaagcaattctcctacctcagcctcccgagtagctgggattacaggcgcccgccaccacgcccagctaatttttgtatttttagtagagacggggtttcatcatgttggccaggctggcctcaaactcccgacctcaggtgatccgcccatcttggcctccctaagtgccaggattacaggtgtgagccaccacacctggccgtgattctttgattctatcagttggtgtttccccctaaaattgcagtcctgtgagtgtgctgaggccgtgcctgggcactatgcaccctcatagcatgggttgccttttcttactgctcctcccctgggctgttttccatctatttcagggctttcttgttactgtgcatcactgtgagctccacagagcaaaggctcactctggtttgctcagcacagtgtacacgccgggcacagtccctctgaacaactgcatgcccacaccactcctgcgtttcacctcaggaccccatggcccacccctgtgagctaagctcatgcctttttactttgagataattatagatttacatgcagttaaaaaaaatacagagagatcccttctgttctacacccagtttacccaaatggtaagttttttttttttttggagacagggtctcactctgtcacccaggctggagtgcagtggcgtgatctcagctcactgcaatctctgtctcctgggttcaagtgattcttctgcctcagcctcctgagtagctgggattacaggcacatgccacctcgcctggctagtttttgtttttagtacagacggggtttcactatgttggtcaggctggtcttgaactcctggcctcaagtgatcctcccgcctcagcctcccaaatggtaacattttgcaaaactaatatatgttatcacaaccagtaaattgacattgatacggttcaccaattggatccagattttgccagttttatatgcattcatttgtgtatggatgtgtgtgtttggctctgtgaaatctttgatggcaggagcagatttgtgtgaccagcactgcagtcaagaggcagaattatgaaatactggttacatgataaaattataatattttggacatatggattaggtaaaatatatcattaaaatatcacctgtttttattttttaaatgttgttaacaaaacatttcaaatcacatatgtggcctatgttatatttctctaggacactgccatcagtccaaaaagttcccctgtgtcccttcccagtcaatcccctacgctcttccaggcagctattgttctgatggtttttttccccactaaaggctatttttttcctttttgtcttttttttgaggtgatatgcacataaaaaattagccattttatttttttttatttatttatttttgagacagtcttgacgtgtcacccaggctgaatgcgggtggcacgatcttggctcactgcaacctccacctcctgggttcaagtgattctcgtgcctcagcctcccgagtagctggaattacaggcgtgcaccaccatgcccagctaatttttgtatttttagtagagatggaatctcaccatgttggtcaaactggtctcgaactcctgacctcaggtgatccacccacctcagcctcccaaagtgttgggattacaggcgtgagccaccgcgcctggcctatttttaactttttggagaactgccaaactgttttccacagtagctacgcaccattttatatcctcaccagcagtgtacaagggttccagtttctccacatgcttatcaacacttgttattgtctgtttttaaagaaattatagtcattttagtgggtgtgaagtatattgttagtttgctttttctggaaagtcatgcaagtggaatcacatagtatggaccctgtgtgagccttcatttgctcaacttatatgcgaagattttttagatgtgtggtttgagggcctggaaagtcatgtcctggcctatggaatatattaaaggggaagataggattccttaaggcaaaagtggcagttcattaaccccctcccctgcaaatccctgccccacccccatcccgctgccacataaagatggacctgtctgcctgccttcactgcagagcaaaaattttatttatttatttttttttttttttaagacacggtctctctctgtcgcccaggctggaacacagtgacgcgatcccagctcactgcaacctccacctcctgggttcaagcaattctccttcctcagcctcctgagtagctgggattacaggtgcccaccaacatgcctgactaatttttgtatttttagtagagatggggtctcaccatgttggccaggctggtcttgaattcctgacctcaagtgattcacctcaagtgatccacccgccttggcctcccaaagtgctgggattacaggtgtgagcaaccacgcccggcctgcagagcaaaaatttattgagcacctgtggtgtgccaggactcatttataagtaaatagaaaaggtccctgtccttgtagggtttataaactatagggggaaactacaagtccacatacacataacctaccatttaaaagtctgactaaatgctgtgaaggagtaagcaaggtgctttgatagggaacagagggacagtgtgtgtataggaaggccagtcaggtgggtccctctgaggaggtgacacttaagagacctgaaggatgagaactgagccagccatgcagaaggatggggaggctgggctagaggagagtgttctaggcagaacaaaatagcacaagcaggggccctggggcagtgaaagcctctggtggttcagtgcaaagttaggaaggtgtgaaacagtgggaagggaagggacagggatgctcctgctggctgatggcccatactgtaggggccacaactttgtcttagctgcaagcaggaccggagacatgaagggccagactctgggccaatttccttgctgcgttctcagctccaagaggcagctcggctgggatattgtggctcattctagtgtcttgcagcctctcaaactggagggctggagggttggggcgtggttagtggcagctgtgacggagacttatcaggaagcaggcatgtaattcctgcagtgattcacacccagtccccagtttactgcagtcctgcagtgattcacacctgggccccagtttaccgcagctgcacctttaaacagggctcggatgcctgcatctccctgacccgtgtgtaccctcatcatcccaggacctcggaggtgtgggtgaggcagcacatagctcagcctggtgccctcctctcactagagagcttgaccctaaagccgcaagctcaagcccacgccctggccaacctcctggagctttgagaacaaggtgtcctgtacacagagtcctggccccagtacctgagcgcacatgaaccccgtatgcaagaagaaaactgaccccagccccatgttacataagaacatctttggaatttggctccttttgaaatgaaatgggaaacctgcactcaaacaagcaggtatggggaattcaataggaggcaaatgccctcagggtcacctctgggccagtatgcattctgaggattggtttattcattcagcaaacattgtggacacctgctttgtgccaagcttcatggagggatacaagaacagatgttcaatcaatgtctgtgggaagaaggagagagaagggggatgaaagggaaggattgagaaggaggagtgtagggaggtagagagtaaggaagagaggaacgaagggagggagggagggagggaaggaaggagggagggaaggaaggaaggagggaggcaaagaaaggggaagggagggagggagggaaggaaggagggagggagggaaagaaaggggaaggaacagagggagggacggagggaagataaatgggcagagataccctcacagagctcatcgtcatgtgactgtgggtgcaggtgtgcccatggtaatgtaactaagtatttacaatctagctcagctctgatcaatggaaaaataatgtaagccacatatgtaattttaaatgttctaatagttccagtaaagcaggcaaggaacaggtgaaattaatttgaataattatttaactcaacattatttcaatatgtatttagtataaaaatattaatgggtatgttacatatctttttcacactaaatcttcaaggtcacccctagcacgtctcaatctggattatgcacatttcaagtgctccccagccctggacaccgtggagggtggcaggcactctgactgaggtgcacagagcctgctgagggcacttaagtcagagtcaaggaagacttcaccgggtggtgccttcagtcatttaatcatttgctcacttactgttcacctaatgtttattgaatgcctcctgcactgggtgtgacggctgggcagagactctgcttggaggaaggagggaagggcattccagactagggaagcagattgcaagctctgagagggcagactggcgtctgtctggttcactgctgtagccctgcacctggtgcagagttggtgcctggcgaacatttgcggagcgggaaaggagggagagaggagttgggcatttctagagcgcaggaggcagagaagactggttagagaggaagctggagacaccattctcaaacttgacagtgcactggaatcactggcagggtttgttaaagcgtagattgttagacacccccctcctgcagggttcctgatccagcagggctggggtagggccaccggatttgcattgccagcaaattcccaggtgctgctgctgctgctggtccagggatcactgagaaccactgggctagaccacgaaccctgtgaaggcagagaggagccaggagaggtttctgagaaggagagaggggagcacttaggtttgtgatttagaaaactgtgggtgtgcggcacggtggcgcatgcccgtagtcccagctactcggtaggctgaagcaggaggatcacttgggtctgggagatctgggctgtagtgcgctatgctgatcgggtgtcggcactaagtttggcattaatatggtgacctcccgggagcggaggaccatcagggtgcctaaggagggatgaagtggcccaggtcggaaacagagcaggtcaaaactcccctgctgatcagaaaactgtgcatggctgctgaggacaggggtttccacctccgtcccacctctcctgccagggcagtggcacccttagctcaggagggtgcgtcaggacccagttccatcctcacacggtggggaagcctgggctgtgctcccagaacaagaaacagacctgggtgatgagtgacaaatgtggacggttctctgcactgtgggtggaaatagaaacccttagtcagctgtggggttcagcaaagaatttccctggttaacggaaacttgactggctgtgggtgagggggaggttgggttctgagacgtctgggaggcctgggctcttcggttctcgtggtgcccagctcagcgtgatgccttcaggtttgagaccacttcctcctgttgagcctcttctctgggggcactcattatgtatgctgcgtaacaaatcaccccaaaaggtgttaagtgaaagtaacaacagatgtctgtgttctcacagtttctgtgagtcaggaacccggggtcgctgggtggtttgggctcagggtctctcaggaggctgtcgtcaatatgtgggccaaggcctgactgggttaggggatctgattctaagatggcgctcacacgctgttggcaggaggcctcactccctcactggtggtcttttcacaggactgctaagtccacactatgacagctggctttcccagaacaggtgatccaaggggcaagacagaagctgaaacatcttttttttgtttttttttttttgagatggagtctcactctgttgcccaggctggcgtgatctcagctcactgcaacctctgcctcctgggttcaaccgattctcctacctcagcctcccaggtagctgggattacaggcatgtgccaccacactcggctaatttttgtatttttagtagagacagggtttcaccatgttggccaggatggtctcaaactcctaacctcaggttatctgcccgcctcggcctcccaaagttctgggattacaggcatgagccaccgtgcctggccagctgaaacatcttttatgacccagactcacaaggcacactccatcctattggtgacacattagccctgttcactgggggagggaactggacaagaaggtgaatcctaggaggctggggtacttgggtggcatcttggagactgaccacaatgcccaaactgccctttggccttatcttgtagtcagtccacagatctccaaagataactgtatctggtgctgctatttgttgtcttggagcttgaagactgggccctacattcctgaggggtgcctgctggagccaggaggtggggtaggggagagccagctagtagctaaacactttactcattccagacactatggtcagcactttataatctaattctcagacaaccttatgagattatagtccccattctacagatggggaaactgaggctcagatagaggagatgacacatctgagatcaaaccactgggaaatggtggggtctgaattctgaaccactacacgtgtgtcttcataccaggtgcaatgcttaggtagactgcatattccccaacagtgtgctttgatggcttctctccagggtggaagtggttggagcaaaggtcagactggccctttcatcccttgggctcagagcctggcactaggcttgctggcagaagaggaaacaggaaggctttgggctgcatgcagatccccaactcttaaaacctggggtcaagtttggctctctcatacattctcatggtggagcaagcatgggtcaagtgtgggggtattggagcctcttaccagctgagtagattggggcaagttaattaaactcactgtgcctcagtatccccaactgtaaaataggagctcattagagcctgcctcacatttgccttgggctgttgtaagcattaaatgagatcatttcctacacatgctagactcagggctgggcaacagcaagtgctcagtaaacatgagctcttcttatcgcaggcttgttagatgctgatatgcatctgctgtctgttcccacatctggctgagctgtgaggatacgagggttgaagaccatggcatttttgtctattgctgggagcatcagcaaatgatccatcctgcaggtccgagagctcaggacattttcagcaaatggctcccaagtcccatacatcactctacctacatcctgtcctggtcctctctgagccaggaacagagggttccagaagccctggaaaacttgcagcttgctcccctccgggcccagccagctactctctagctgttcctgtctgataagagagtggatttttccatttcctgcagcagaaatgctcctgtttcctctctgcccacccagctgccctggtttctgctgctgcacgggcagaagatgggtatctggaagtcacaggagattgtgcagcatgcagggagagtagcaggacagggccccccaggcaggtggggctgcaaggcagtcagcataccttgcaggagccagacttctctgttttgttttgacatgggaaccgagtctgtatcagaaatgacaaaatcaaacacccgcaaacaaaaccccccagcgaagcaaacaggaagcagggtctggataaaaataccatcctttttgcagctgcagcctccaccatgcaggtttcagaaggtcacgctcttgacaggaaatgtggctgctttcagaggggagaggtggctgagttggggccgggggtagagacagtggggacagccagaagcaacagcaggctctcgggggaggttcgtgcacctttcacttcttgacaggtgaaggaactgggcccgatctgtctgttcccttcctggccacgatcccagggttcaccttggacttatatttgtttcttcctctcctaccagggaccaggagacttttattgtgagggtgaaatgagactgtggttttgaacttttttttttttttttttttgagatggagtttcgctcttgttgcccaggctggagtgcaatggtgggatcttaactcactgcaactccgcctcccgggttcgggcgattctcctgcttcagcctcccaagtagctgggattacaggtgcctaccaccatgcccagctaaatttttgtatttttggtagagacaggtttcaccatgttggccaggctggtctcgaactcctgacctcaggtgatctgcccgccttggcctcccaaagtgcttggattacaagcatgagccaccactctcagccattgaacatattttgttagctgaaaagcattaccctgaggatcagcaaagtttttctgcaaagggctagataagaaatattttcggctgtgtggccatatggtctctgtctaactcctcagctgtgctgctggagcctcaaaacagccataggcaatgcataacaagggagcgtgtgttccaattagtttttggacactgatatgccactttcatgtaatgttcatgtattgccaaatattactcttctttgatttttttcaaccattaaaaaaaaaatagaagccattctcagcttgcaagcagtataaaattaagccagatttggtttgtagaccacagtgtgccaacccctgcactctccaaacaaaatggtttgtattattgttgctatttaacttcctactcaatacaggaatcccagctttagcacttccttcatggggtcagccaggttgagactttgtttctgcactagctactttgagcagaaatagagttcttaccacttggctatcattctgcggaaggtttttgttttttagtgaaattgagaagttctgattataaaggtagtacatatggattttaaaatgcttgggaaatactggcaaacacaaaataaaaatccctgataaatcatagctactgtattttttttccaatgaaaagtgtgtggatgtatggaaagcatttttttcctttccagttgagattccattgaatgtaaagttttgactctttgtttttccattctatgttatatatcaagcattttcccatgtcattagaaattcctcaaagataccagctgcagaatattccattatatggatgtttcataatttaccaaatcaacctccaattgtttaggcatttgggttgcttccaggatttctcacttataaacaatatgcatataaacaatgctgctgtgaacatccttgttcgtaaatctttgtctgccctctgatcttttctttagggagaatgtgtgctgaaaattcctaggaaaactgtgcttctgacttatatactaacttttttttttttttgagttggagtctcgctcttgttgcccacgctggagtgcaatggtgcgacctcggcccactgcaacctccacctcccaggttcaagcaattctccacctcagcctcctgagtagctgggattacaggcacccaccaccacgcccggctaattttttttgtatttttagtagagatggggtttcaccatgttggccaggctgatctcgaaatcctgacgtcaggtgatccatccgcctcgggctcccaaagtgctgggattacaggtgtgagtcaccacacccagcctatactaaccatttttgctttactgaatttgactttgctgattatgcagttcataaggtttcctcactgataatgacttcattctcccctcctgcaccgctagccccaggcgaccactgatctgctttctgtttataatttcattttgaagtatctcatttttgatcagcctaaagttgattacctccttatttgctcagaattccattcttcataatagtaatgctgccacctccactttctttgtgtttgtgtttgcctgttttatatttgaacattcctttaattttagtctccgttattttgtttggaatatatctcttgtaagcagcacacagttgtttttttttttttttttttttttttttggcaaccaaatcattgctgctttatgggaaggataaatgattcaatttactcatctggtacatgtttggatgtcggtcatcttgcttcgtgatttgtggcatttatttcttttattatttctttcattttgtgactttaatgaatactgtgttgatttgcatttatcttttccatcgataatatggaagatacaagtagtgacttcaatttcttatgtggttacctttaaaattttcagaaatcttgttttatttccccaggcagacacttgttcatgtcctatgtaatacagggctgaggcagagtagcatctttaggaaagaccaaaattgaaagccaaggcagagacaggggaggtagttttgggacagcagaacaggaccagggaaatcagagggaagcttcagagtggacaggtgtgagctgaaggaacttcccccttcatacacagcttgttgccttttcctaaacattgataggaatggattttattcttggctatatttgagtgagggtcccttgtaattagtcatgcctgaaataccagttatgtatggaatcaaccagactagaatttgagtctcagtgcttactagctaaataatcttgggaaaatcatataagttatctgtcaaatggtctaataatagcacctaagtcatgtggttgttgtggggattgaggcatcccagggatctgggataatacatgtaacatcctggtacagtgccttatacttggaaaatagtcaatgaatgttagatgctattatgatggctgtgaagctattacagtgtttatatgcatgtatctcctacctgcagggctggaaatatttttatctattacttgcctggagatataaagtaaatggactatttttaaaaattcaggattgatagctggaaggagaagtgaggtgagagatgggttttagagagcaagagcgagtcagaaagaggcattcagggcatctggggagaggggaattgggataagagcagataccttggagagctcccggacggccagtgcgtgtttaggcgggccaggctctgcggagcggaagggagatcaggtccctaggtctgcagtgaagctgtaaggagaggtgctgggagaattctggaggtagaatcagtaaagaacaggggcctggtgcagcgggggtctgatgtatttatgaatagaatgaggaagttccaagttcgtgtttctggataagggggacccttgccttcagtctctgagattaagtacagtgaggggtaagagaaggggaaggaagggagaagaagagagagggaagggtccaaggcacacagtctttgcagctttggtggagaaatcttacaggcccatatcatcttcacggtagctgagttaaatgcagttctccctccctttgaggaaatcgaatacacaaatgtcccctcacacattaggaagtgattccccacctcaccccaacctccatgtgtcagaaagactatacatattgaaaaagattaactgcaggcctactttgtacatcagttttctgggtatctttagttttttattcttagaatttaaaaaaatatttttaatttgttcattcagtcaacaaatatttgttgagtgctttctctaggagctgcatgccccacataagaagacagacacgagttgcccgcatagagcttatatcctaaagggtgtgctgtcacttttcctgcatacacccaatgccagatgtaagttacatgtgcagaggcatctgggtagctgatgtgaatctctgtcaaccccttctgtctagcagagacatatgtcctgggcacagaggttctagaagggagcaggtttatagctacgtgtctggggtccccttggccatcttgtcctggtggtgctaagggtgtcagagatgctaggagaggaactggcctctttgttcaagccaaagggtgaagattctctctgacaaggaaaagtctgtggcccagcctgggaatgctcttgtccaaaggaagaagcatagagtagctcaagaacagatgttctggctggttctgaggcttgggtagaggccaggtaagctccattcacttctgcggtcatcagaaattgactgggggcctgaactacatcacaggagcagcacggtagccaaaagatggtcctactcaccctatccctccagaactttagtgtcgtaaagacacagacaaatccatacataactataaaatagtgttaagtctttttggagtttgggaggcacagcagtcatatgagaagggtgcctggcccagcctgggagacctgcaagaggctttgcagaataaatgacattgaagctgggacttggaatctaagtaagaattaaccaggtgaagtgaagacagagaaagacaggcagggctgggtgtggtggctcacgcttgtaatcccagccctttgggaggctgaggcaggaggatcacttgagctgaggagttcgagaccagcctggacaacatggcaaaatgccatctctacaaaaatacaaaaaaaattagctgggcatggtggtgcgcacctgtactcccagctacttaggaggctgaggtgggaggattgcttgagccctggaggttgaggctgcagtgagcttgatcacaccactgtactccagcctgggtgagagagggaccttgtctcaaaaagaaaaaaatactattccattgtatggaattttgtttatctattcattagttgatggaaatttgggtattactttagagatatcgcgactaatgctataaaaacattcatatgcaaagttctgtgtggacatatatgttcattcctcttaaatatatacctaggagtagaattgctgggtcagatggtaatgctgtttaactttttaaggacctgtcagtctgttttccacagtgctgtgccatcttacgttcccaccagcagggcccgagggctctgatttccacgcgtcttcacacggttgtccaacccctcctcttcttgaatgggccaagagtgatactttctatctggggaagagcaaggggctggctcctgggacctgaggcttggtcctggggatgtgactttgagggaagcccgtgtctttctggtccaccagggtgagtcatcacccaggatcccgggggagctgcctggcagaggggcgggctgcaccagccactgcagaaaccaccatgcaacttgactgagtctccaccctcagctccaggcagccgggcttccctgggagcagctatttctggctatttctgctccagggaggagcagtggtgggtggaaaggtttcaattgctcagtggggtgatttttggaagcgcagtgccttgggggcacaggacagctttgacttgggaggagagcagaggggctgctctgagagtgctggccctttggcgttatcagagcagagggctgggcacacagcagtcctgacagcaccttgaagagggggaaataagtcagtgcggactgggctgttcatgcaggaggtgcaacccagtgggcgggatgtggcgacatcaggcaggccaccagggtgcttggaagcaggggcaggctggggtctacctacaatggagatgcagcagggagaccgacagaggtggcgctggacctcaggctcagtgttcacttctgtgcctcagtgacttcatttgcaaatatagtaaccacaaaggctgcagcaatgcctgttggcaactgtcttctctatcacatgatgttctggaacactgacctttattggcaatgttcttgacctttctcttagctttttgccatccctgtgggctctcttcatgataacatctgtgtccatcctgttcttctctccgctgtatatgcttccttccctgggtccttgtttggtaccattttagcaaagtggttaagggttcactcttcggagctggctgggcctgggtgaaaatcccagctctaccattcccagccaggtgtctttgggcaaatcatttcatgtatgcaaatctgagcctcagttttcccatctgtaaactggagcaataatcgcagggagctatttaataacagcaggttacttatcctcgtaactggattatgaggactaattgacttgatggatatgaagggcttaacacaatgcctggcacacagttagtgctgggctgtagaaagagcaagggcacagggcagagagaatgaggagtgggatcctggacagagggacatgttgagtcccctgtatccagcctgcagagggggacagtgttgggtggggctgaaggactgctgtggtcagcctccaggtcaggtggtgttgatgagggaggctcaaggaagggtgtctgctcactcatttttttttaagtttgttgttgttgttgttgttcttgttcttgttttaagagacagcatcctgctctgtcatccaggctggagtgcagtgatacaatcacagctcactgcagcctcgaactcctggccttaagtgatcctacggcctcagcctcccaaagcattgggattacgggtgtgagccactacatctggcctcactcgattttgtacaaaagtcacaatcattgctttttattcctgagtcatactcctgttgtgccccatgtctgtgggactacactgacaaatagtttcatgccctcaggaacaagtagctccatgggtaacaaagtaagtgctgctgtaaaggacaaaagcagaaatgcagggtagtgtggagagaatagatggggaagctcaatggagattagggcaatcagggaaggcctcccagaggaggtgacattttggctaaaacctaaaggatgaagaagagtttgccagcccaagaatgggaagaaagaaggctccgggcataggaaacagtgtgtgcaaaggcctggaggatcagagctcggtttttgttttgttttgttttaggaaatgagaggccagtgtggctgaaccagtgagggattcagggagggatttccaggtaaggcaggtgtggagcaggcagggactagatcatgcaatgccttggaggcagtgggaggatgaggcctcattgctgggcactgggcaggaaaggaaggaagagagataggagggcaggccttgtgagtgaacctgaccctgcaagtcacatggcgaggtggcagcagctcagccccagggcaccccccggggagatgcagcttgcccaaggtccacctccactgggcagacacctctgcctggctgtctccgtttccccagaggaggagcaggagccacgcctatggtcgcatgttgctaaccatctcgaggtcaggaagatgctctgtgagacggagtgggtcagatgccaaagaaaacacaagcttgtcagcggtgatgtctccctgcaaaggcagccgccaccagcttcctgccgagatgggccggctcagcctcacttgctacagctggagatggagaggaccagatggccctgtttggcccagattccagccagattgccagggaggtgtaggcggagcagcggggtcggcgccaggagcagggatacgtgagtgaggagggcgggagccacctctttgccatctcagtagggccctgcctgtgtagggggtggcggggcaccgactgtggccttacagtggtctgtgaaccagcatatgctcagagctccctggagggagactgcctctgtcttttaccaccagctctaaagctcttgagaggtgcaagatgttgatggttgtattcccagcatccagcacagggtggcacacaagcaagagctcactggttgatttttgtttttatttttaaaataaatgctaacagtagccagggccttgtcttccttaaccccacagcaatgccatgagggagcactgttgtgatccccattttgcagatgaggacatggaagcagagaaggggaataacttgcctagagccgcagctaagcaaatgcatgagaataaatgggtcactctgacaaactgatggcagagcctgggacttggggctttgtgggcaagaagctgccctgagtgtgggcaactgagagaaggtgtggacactcctggccgaagggaataagcgtgcctttctcgtctttgtgctccctgagctccaggcaacaccttagacccaagccagcttcctccattgctccaggtgctccagagagcaagagatgagccgggagaggtagggagacaggacccctggcgtggctgagcaggctgcacactgcgtaattccagggcactgtattcacacagactatgatgagaacagtgcaaggtactgttatgcaagcgtatttgcatattgccttggaattatgcaaggcagtagctctgtaggcggaaccacaccatacaggactttgaagaccaggggtctgcaaaccttttctgcaaagggccagatagtaaatatcgtaggccacgtgagccatacagtctctgttgtacctactcaattctgctgttggagggtgaaagcagtcataggtgatatgtaaatgaatgagtgtggatgtgttccaataaaactttatttgcagaaacaggctgcctgccagatttggctcacaggccatagtttgtcagtcccaatgaaggtcatggaaggattttgaacttcatcccaagggcactgttggggctggacgtggttgtgcgtgcgcctggagtctcaactactcagaaggctgaggtgggaggattgcttgagtgcaagagtttgagtccagcctgggcaacatagtgaggccctgtctcttaaaaaaagaaggcggcggacaggcacagcggctcacacctgtaatcccaggattttggggggctgaggcaggcagatcacgaggtcaggagattaagaccatcctggctaacatggtgaaaccccgtctctactaaaaatacaaaaaattagctgagcatggtggcacatgactgtagtcccaggtacttgggaggctgaggcagaagagccgagatcgcaccactgcactacagcctgggcaacagagctaaactctgtctcaaaaaaaaaaaaaaaaaaaaaaagaagaagaagaagactgggcgtggtgactcatgccttaaatcccagcactttgagaggctgagatgggaggattgcttgaggccaagagtttgagaccagcctggtcaacatagtgagacccccatccctatattaaaaaaataataataataaaagaagaagaagaagaaaagagcagaatggagccacgagaaggttttaagcagggagtcagggagccaggtttacattttaaatggccctgaaagagctaatccctcagcagggcaacaccatttcttctgtcccatttgtgcatccttgaactcttctatcttcaagtagaggcttggcctgggattgcagggcgtctgatacatagagagttccagaagcaaaggtcactgctgtccatttcccattaccctcgtccccaaatcagctgtcagcacaggtctcgacgtggcagaaatccagaaatgctgttcctattcctggccttagggcagagtagaatggtccactggccaccagcctgggctttgaaatcagagaggcccggtgccaaatccctgctccttaatttggccacatgtgactaagctacatcttcctggccctctgtctcttcttctgcataagaggaataattataggtgtgaactcataaaataaagtggttctgaattgaccgaggtgcaaataaaaggcttagtaagaaaacattatttttatttatttatatatattttttgagacagagtcttgctccgtcgcccaggctggagtgcaatggtgcagtctcggctcactgcaacctctgcctcctaaattcaagtgattctcctgcctcagcctcctgagtagctaggattacaggcgtgcgccaccacgcccagctgatttttgtatttttagtagagacagggtttcgccatgttggccaggctggtcttgaactcctgaccccaagtgatccacatgccttggcatcccaaagtgctggaattacaggcatgagccaccgtgcctggccagaaaacattattaatataataataattttcttactgaactctagaggcagggagcccggttgtgcactgggcgccgaggactttgctcctgtgagtaggtgcagagccaggccttgggctcctaggtacattggaagtagcactgctgaggcagccttggctcatgagtactaagggcttcctagagatgggaatcatttgtcccacctcttgggctgaaaataactgcccaacatcagggtaattacatgacttggattcctccaccgcatggagaacaccccaataattactgtgcacaaacactgcttttggcagctgatgcttattttctgcctccaggagtatctcctggacaggaagcttattctgctacccaccccatgggatttgaacccctagctaatgtgagcagaaccatccagaaacccatcctagtcagggatatagtggccactgctcctctcccaaaagccatctgtaatgctcagggcacccccactcacccgtgggcaggttgggccttggtgatcagtggctttgccataatctcctacatggtcctgaggctaacaccaggcactgggtctgtaggagatgcctgcgagcagaggactgcctgctacagacatgagtcttctggagtcagcccttgagggtgatctgctttgctcagtgatggagaggctttgtccttggactgaactagagggctgccaattgggtcaaggtcctagaggagttcttgaggactcactgtgtaccaggctttagggatagagccataagtaccaggtcatggttctgcccttgtggggcttagtgtccaatgggcagatacactcaaagcccataattagttatataattgtagttgtgacaaggctgtaaatgagatgtataggagctatgggtatatataacaggagcctggggagtttaagctgagacctaaaggacgaggagtggggcaaaggtgtgtgtgtgtgtgtgtgttagtgttagaggcagatgcatggatgatggtggttggatggatgaatggatgctggtggatggatggatgaatgattgagtctcccaggcaatgggaacagactatgcaaaatctcagaggccacaagaagtgatgtgactctgtaactgacaaaagactattgtggaaagtgtttggagtttaagaaatgagagtggtgaggttagcaggtaggatgattgtgcacagctgagcaagttgtgtactggacagctccagaagatgccagtcttataaaccatgatgtggatggtgccacctagaattgtgcaagctagagacctgcagacagggctcacatcacgcaagaacttgtatgccataggaagagttgtggactttattcccagagcaatggggagccatggaaggattttaacaatttgtgacagagctaattttcatttataatgccccaaagcagcaccgtccaatagaactttccaagaagatgaaaatggtctatttctacactttccaatatggtagccaccaaccacttgaaactgagcacagcatgcctgagaaactaaattttgaatgttaattcgtttaagcagccgtaatagccagatgtagctagtggcaccatgttggtcaggacagcgccaaaggatctgaccgtactggacaaagtcctgtcatgcttaacccatactggctatgcatactgggcaggtctactggagatgccacctcttactgggtggtgacctcaacctccccttcacgcagggcctcggttcacactgaggcctagggtgcaactgggactgtggtttgggagctgggcctcatgaggatggagctgaggggctgtacccccaccccatccactgctcctgagcccttgaggactcctcccttgcctaccagcttctttttcccctggcaccccctggagttgctgactgggtttttttgtcctgcagaagggatagtcttctcttcaccctgcccagctcacttctaatttgtttccccacagcagaaatcaacgaggaaaccacctcagccctgccctatggcatgaaccgtagcgtggagatagtgtccacggtggggattaggggatgtggactttggcttctgtttcacagggagctagacttggctgggggtgggaggaggctcagagggctcagggccagcctatgtatcctgtctgcagtgcctgggcctgcacgcctggcttcatcagcacgatggcacgagggccacccacacaagccagcttgtgtattcaagttcgtccacttgccccacaaacagccaccctctgttcaccactctggcctagaggtccgcttgcccagtaactgcacagtctacctttgggaagctggatccagggaagatcctattgaggccctgcaagcaggctcggagtcatttggacagggacagtagaggtgtggcctggaaggggagccaggggcttgggtggactcgtcccactggccccctggactcctcatccacggggagaggcaaagctggagggcctgagatcaccctgccaaagccagagctggggtcccagttgccaagcctgggaaggggcctgcagggctggtgggtgagctcctctcttctctccctttgcacgtgggttcaggggagaattggggcttgaatggtggtgggcagaggaggagggaggagggtcacagtgataaggggagggggcttatcctaagcaagagggattccaggctgtcaatgctgttcactctggcctccctgcccacccagaatccctgaacacacacacacacacacacacacacacacacacacacacacacacacacacccctagacaaaattctagggattggggatggttaaaacctctgctaccctccttccccagggctcagtagggccaaagaaggggcatttgacacccataggtgagccatcacctgctgtggggacccacagttttagtaaaaatcatcacatctgccagagcaggagttcaccttcaaaccacatgctggccactgtgctgagcccctggcatggctcacctcgatgaccactcacactgctactgtgaggaggatgaacatcatccccattttgcagatgagaaaactgaggcacagagaaggaagtgtcttgaccaaggttgcacagccaatgagaatggtgcccaaatttgaacctccagagtgtatgctttcaatgactagaatgtgcatcctctggacaacaaatataacttgcttagctcagtgcctggcatccgggaagtgctaaataattgttagttcttgttattgttatccataataagataggcagtggcatctacctcttggaaattctgggcgtcagttgtctcatctgtaaaatggggagttgttactacattcttcataggcctgggggagagcgggtcttacccgggcccctgcatgcctgcacacccagtgtgcaacgggaagctcactcctgtaccctcctattgcagtacgctacttcctgaagaataaggtcagccctgatttgtgcaatgaggacggactcacagccctacaccaggtaaggccgggctcgttggggctccagggctccctgcccctcacctggacaggtaccctgtttctcggcactttcctgctcagaaccctcagggaggagggaatgagggagggaggaggagctgcagctggcccatctgaaaggctcttgtctactttggagatacgcgtgtctgttactgccatcccacagagccctgtgtgcgcccgcagacgcgactgcacatgcaggctctaaggacagggagcctttgttcactgcatccctcctgcccatgaaagcaagtgtgtttggagcttgacagtgtacgaagcacattcacacttatcaggacatcccatccaccctggcgacagaggcagttggcgggacttatgtgacctgcctgaggtcacatggtcttgatttatggtcttgagccatgtgctatcatgacatgtcctttccaaggcagagtgatgggtccagccctccctgctggggatggcttctctggctgtcacctttcacgtggatgctgctacagcctcgtaactggtccccagcattcagtctggctctgccataattctctgtccacgcagcagccatggggatgcttaagccaaaaatctcttcctgttactcaaagttctctggtgtcttcccataatctggggataaagaacaaactctgccacagtgcacaaggctgcacgaggctgggctcatgaccaatcttctaagcctcctggctctctgggctccagccacccaacttctcaggtccttgtacccagtgggctcctccccaccacacttcccacagcacttggtgctttcacccattagctgctgtccacagcaagagcctgggagctgtgctgtgatagacataccctttgtcttctgaaggccctcttccttcgtaattagtcattttagccattgatgtcatcacttgatgttgacttctcccctactcagacgctgagctgcctgagggcacagcacatacctcttgcttatgagtgtgtcctagcatctttccccatgctggcatacagtaggtgctcaatatgtgcatgttgaattaatgcatgaacacaccaaagcctccctgtgcccgagtttctaagcagatggacttgagtgagaggccaggcaaccagaaccctgggctggtgagggcctctccacctcggtacaagggcaggggtgggatgcacagagaatggccacgccctgcccgtaagccccaggggcaggtccctgtgtgtcctcttggcttctctctcacagggcctcaggcatctctcaggcagctgcctcagtacccccactccatctgccattggaaactcccagactcccagctccatgaaccctagagggcctgggactccactagggagcagagagcgggtggctgctatagcttgccctgaaatggagacccaaatgccaattcccaaggctgggctgcacccaccagccatgggcatgaggatcaaatgtgtgggctacctcctactgcgtgccagaaaggtgaggatgtcaggactgacagtcaggcttgtggcccggagctgtcacccactagctatgtgactgtggggaagttacttaagctctctgtgcctcagtttcctcatctctaaaagaggaataacaagtacccatctcattgggtggttgtgaggattaaatgaacacatgtaaaactttaagcagcactcgatactggataaatattattattatttattaaaagttattaaaatgtatcatgtgaccacttccctgcaaattacttcagttatatatttcatttttatccttacaacaaacttcagaaatattatcatccccaggccaggcgtggtggctcacgcctgtaatcccggctctttgggaggccaaggcaggtggatcacctgaagtcaggagttcaagaccagcctggccaacatggcaaaaccctgtctttactaaaaatacaaaaattagctggaatttggtggtgagtgtctctaatcccagctactagggaggctgaggtagggagatttgcttgaacccgggagacagaggttgtagtgagctgagatcatgccactaccctccagcctgggtgacagagtgagactctgtctcaaaaaaaaaaaaaagaaatattatcatccctgttttatggctcaggaaactgaggcagcctattcaatagaactttctacaatgatggaaatgttctgtgtttctgcagtgcacagtacaatagccaccagccacacgcggatccacagcactcgaaatgtggctgatgtgactgaggaaatggattttgaagtttatttaattttactggatttaaagaaacagtggctgtcttattataccgtgcaacttggggaggtgaaatctctttgtccaaggtcaagcagtgattgagtgtttaagtcaggatttgaaacaaggcagtcttaactgctctgtgggcaccacagctgcaattctctgagccccaggtcccctgttgagttgccatccctgcttgcaatgaactctcaagtggcaccctttttttagcttggggttcccgccacctcacatagtgcctcaacttcttccttgttggtcacattgctttctcaggaccagtttctcctgtgggttcctgggcccctggggatgcgtggtcagggaggcgggaactcgccaggctccgagtttagctgcatgaagctcctggctgaccagctgaaacccgcacctcaccccaaccaccacacgtgccttgggccccatgttggggcctttcagggagacatccaccctcattagcctgtgagcttccatttattttttcaacaaatacctattgtgtacccactccatgccagctgtcttctgggaacagggccccagaagtaagttaggcagagtccctgctctcagagttcagagtgtgctgtggccacaggcacataaataataatagaggtaatgcagtgtggtcagcccttgcacggagataggcaggggctcagtggcagcttaaaactgggaaccgatgactcgactcaaaggggaactgagaaagacttctaagaggaagggatatctgagctgggtcttgaaggatgagtaggagcttgctagctagaaaagaataaggcagaacattcaaagccgagggaatagcatgtgcaaagccttgagaaaggggctcagcatttcaagtttggagtctggagggttccatgtggcacagttagagagcagggagcctcagggagaggtgcaggtggtgagactgagagggttgagaacagggcctttggagtcagactgcttggatttcaattcatcttactccatgtgaccttgtaccaccaggcttccttgagccagtttccccatctataaaaggggccatttccccgtctgtaaaaagagcaatcctcataggcttgttttgaagattaaatgaggcaatgcatggccaaagcttagcaagctgcttgactcttgtaagtcctcagaaagcattagacattgttattgacaatgtgatgtgacatgctattactgttgctgccggggctgttgctattgttatcactgctattgtcactgtagctccagtgcaacaaaggagatgggggcacattaagaagagcttcccatgcctggcaaaggagtgtggattttcttctcttggcaacagggagccctcagaggtttgtaaacggagagcaacatgattagattaatgaagaagctctctctggtcgagggtgttaggaaggggaatgacggggaggtagggaaagatgatgaaacttcatccagggcagagggtggggacagcgatttaggagatgtgcaattcatacctggtgatagattgaagctgggaagggaggaagtgggaggaggcgggaggaggcgggaggaggcggctgactgccaggtgccatttcccacctcggccgcagcagaggaggaggcccgcccactccaccagctaccacccactccatgtgcgcccctgcacccagcccccaacgcagcccttattcaggccgggtctcccaggtgtagactggtccagcccctggacatctatctcacaagactctgccatctgggcacacagtcccctcgcccttcaaccagaggcttccactccaccccctatgtttcctgcggtctctaggggttggatttctggccctcttgcccctgaccccaggggctcctcagcggcatctcccagtgaaggcctggagatgctcaccttccaccgcagcctcgcttcgttgcctttggcgccctctgccggccgcgccgtgctgctgcgtggttctcccgcccgtctgaagcagcacccactcgcttacagggtcacacctttccctgcctgtccggagagaatgtcctcagacctagccaccgtcccccccgcacccccgcacccccgccccgcaaagaccggctggcgcagaaagaacctgggtctctggcgccatctgtgcaaacggctgctcctttcccacatgtcctggcgctgagccctggcttccctggggataggggtggggctgtggtgccgccccatcccacgcctacacccacgcccacagccacctggggccgtgggcttccacggccgctcctgctccttctgttggcgtctggactcttctctctatccctgtggtcgtttctggaggccaggccaccatcatctcttaactgggtggcttcaacacagctcctcactgtcccctcccaacgtgcacacatgtacgtgggcgtgcacgcgcacacacaccatctgttctccacgtgtaatcagaggagcagttgtttttaaaagcaattctgatcatgctccccttcgtagtgtaactcaatgtctcccattgcactgatgaccaagccccaagcccttatctgggtgggcagggctgagcctgtgagccctgctgtgtcccctgctggctttcgcagaggtcacctctagggaagagtttcatcccgcagtctgtaaagtggctccctgtctttctcctctctcccggcctttcccatcctggtgcctagcttgacgctcctctgtctccttgggatcttttcctccctgtccctggagcctgggggccacctgtgttggagcctgcgttctctctaggaggctgcaggctgctggcccttcccccttactggggctgccccacgtgccatcactgcagcatgtaggcaggaacacaaacatggctgtctcctcgcagggactatcaggacccctagaatgctcacgttgagctggattatttcagggggagtcttggttacctgaaggcttccccaagatctgagctacctggtcagaggttcctaagtcagaggtttcaagctatgatcttgaaaccgctttggaggccactgccaggaaaggggacaccctcccaacacacacacccctgcctcaacccaaccaatcctgtttgaatttactggtcatctaagtgagagttctccatataattttctttggagaaagccttttgggattaaaaaatacgttttaaaacctcattcaaaattttgtcccatttcactgatacttgcaaagcactttatagctgacagagtgttttttacctgtatatttttatcttacatattattaacttcatttttactcacaaggagactgaggcccagagaggttaagtggcttgctcaaggtcaagggcaatgcttacagtgtgaacatcatggagctggattcaaacaggccttccacagtcttcctcatggcctcttgcggggaacctggtgtgtcctgaccagggcccggggcccagtgccctgcctggagctgactctgcctgtgtgtctctcccagtgctgcatcgacaactttgaggaaattgtgaagctgctcctctcccatggtgccaatgtgaacgccaaggacaacgagctgtggacacctctccatgctgcagccacctgcggccacatcaacctggtgaagatcctcgttcagtagtacgtgcccctccctgccccagagcagcctccctccacctcttgtctttttccaacttccttctttctctcctccctccctccttccttctttctctcctcccttcctccttccttctttctctcctcccttcctccttccttctttcttccctccctccctccttccttctttcttccctccctccctccttccttctttcttccctccctccctccttccttctttcttccctccctccctcctttcttctttcttccctccctccctccttccttctttctctcctcccttccccccttccttctttctttcctctcttccttctttcttttctcccttcctcccttcctttcttccctcccttcctccctttctgcctttcttctgtctcccctcccttccttctttcttcccttcctccctcctttccttctttcttcctccctcccttccttccttctttcttccctcccttccttctttcttccctccctctctccctccctttcttttccctacctgcctccctccctctctccctcccttcctttcttctttcttcccttcctccttccctccttttctgcttttcttccttcctctcttttctctttttttctctctctctgtcactctttctcagtctctcttggtgcttgtcactttctttctccccacatcctctcttcatctctctctctgcttctacctctcaccctctcctcccctcagttcccctttactctccccatctctgtgtgcctgttctgctcttttcttcttctatctctgtctctccttcactcttggtctgtctctgtattttccagtctctttttattttctctcttctcctttcattctccctttccccccaattttttatagtgataaaacacatataacataaaataccatcttacccattttaagtgtgcaggttagtggtattaagtacattcatattgttgtgcagccattaccactctccatcttcagaatgactttcatctcgcaaaactgaaactctgtacccatcaaacagtaattcccattccctgcctacccctggctcctggcgaccaccattctactttctgtctctatgaatttgactactgtaagcactttatagaagtggattcagaaaggccgggcacggtagctcacgcctgtaatctcagcactttgggaggctgaggcaagtggatcacctgaggtcgggagttcgagaccagcctgaccaacatggtgaagtcccatctctactaaaaatacaaaattagccgggcatggtggtgcatgcctgtaatcccagctacttgggaggctgaggcaggagaatcgcttgaacccaggaggcggagtttgcgatgagctgagatcatgccattgcactccagcctgggcaacaagagcaaaactgcacctcaaataaataaataaataaatgaaaagtggattcagctgggtgtggtggctcacgcctgtaatcccagctactcaggtggtggaggcaggagaatcgctcgaacccaggagactgaggttgcagtgagccaagattgtaccactgcaatccaccctgggcgacggagtgagacaccatcttaaaaaaacaagaagtggattcatacagtatttgtctttttttgactggcatatttcacttagcataatgtcctcaaggttcatctatgttgtagtatgtgtcagagtttccttcctttttaaggctgaatgtactccattgtatgtctataccacgtttcacttatgcatccattcattgatggacacttgggttgcctccatgttttagctattgtgaatcatgctgtgacgaacatgagtgtacaaatatctcttgaaatcctgcttccaattcctttggttatacacccagaagtggagttgctggattgtatggtaatgctattttaaattttttaaggacctgctatactgttttccacaacatgttacattcccaccaacagtacacaaggattctagtttctccacatcctcaccaacacttgctattttctgctttttcttttttgttagtagccatactagtagatgtgaggtggtctctcactgtggttttgatttgcatttttctcgtgatgagtgacgttgagcatcttttcatgtgcccgttgtccatctgtatgtcttctttggagaaatgtctattcaagtcctttgtccatgtttgaactgggttgggtttttgtcattgaattttaggatttctctatgtattctggagatgaatcccttatcagatagacgtactattttctcccattctataggatgtctttgaaatcactgccaaatccactatcatggaggttttgttctatgttttctcctaagagttttatagttttaggtctttcatttaggtcatgggtccagtttgaattaaatcttatatatggtattgggtaaggatctaacttcattcttttgcatgcggatatccaattttcctacactatctgttggaaagatggttggtcttttctccattgaatggccttggtaccctgtctaaaatcatttaaccgtgtatgtgagggtttgtttctggactctattctattttattggtctatatgtttgtctttatgccagccccacactgtttgatgctagagttttggagttcgttttgaaatcaggaagtgtgaatccgccagctttgttcttctttttcagggttgtgttggctattcaggttccttgagattccctatgaattttagagtaagctattctagtctgcaaaaaacatcattggagattacaggtggctgacacctgtaatcccagcactttgggaggccaaaatgggtggaccacttgaggtcaggagttcgataccagtctggccaacatagtgagaccctgtctctactaaaaatacaaaaattagctgggcgtggtggtgcacgcctgtaatcccagctactcaggaggctgaggcaggagaactgcttgaacctgggaggcggaggttgcagtgagctgagtttgagccactgcacaccagcctgggtgatggagcaagaccttgtttcaaaacaacaacaacaacaacaacaacaacaacaacaatcattgtgattcttaaaagtaatggcaagaaccacaattacttttgcaccaacctaaataataattggtatcacccagagctgggcactgggcacacagggatgcagaagtcctggggagccaggaagaaagccaggggttttaagtaccagagctgagacagagccagaccagggggctgatcatctgagggcaaggagtcagagagagtggcccagggcaggtaaccttttgcactggtcttggcagagcggcaggagcccatcgttggctcccggggggatggatatgacagtactgctgccccagctcagagagctggataaacttgctctggggtgtacgaaagctcagagaagtcacagtggagggctgttaggccaaaggactggatggtggcctgtgcctatgtctctgatgggaacctgagtatggctaattctgctaggagcatcagatggccacagcctgatcagtgatggtgctaagaggacaaggaaagtggtgccagcctgggtcagtgggtcccaaagctgatcggtattacaatcacctggggcatgggtttaaaacagattcccatgccctaccccaaggactctttcaggagggctggagtgaagcccacccaagatgctgcattttattcccatggtccccaggtaattctgccacatggcatccagggccattcttaggaaccactggcccaaagggtaaattcttccaaggagtcccaggtctccattcttctacctctgtactatcagccttttgagtagggacttggaggaggtggaatataactgaggatgtttctgcatatgggcaaaaaatgaaatagaacatggagaagtaaaaagaactaatatgagagacctggttttgagtctggactctactgtatccaagctgtgtgaccttggacaagtgaccgaacctgtctgagtctttttttttttttaaacttgctctagtcttgctctatcacccaggctggagtgcagtggcgtgatcttggctcactgcaacctctgcctcccagtttcaagcaattctcatgcctcagcctcccgaatagctgggattataggctcccacaccacgccccgctaatttttgtatttttagtagagacagggtttctatgtcggctaggctggtctcgaactcctgacctcaggtgatccgcccgcctcgccctcccaaagtgctgggattacaggcttgagccactgtgcccggtcatgtctgagtctttgtttccccttgcgtgagatggggccaacagtattaacctgagctattataagggttaaataaaaggatgcctgcaaaaggggcttagatcaggtttggctctaagcaagtgcctggtaagtggtgctgctgccattaatgtgatttttgttattgtcaccaggaggacttttatatctgtccctaagtccctgcctgctggttcaacagagtgaaaggcttagggaggtcttctgggatagctgtcctgggactttggtctcttcccacctgggaccctgggatcctgaagctgtcgtgctcttgggctgtgtgtcaggcagatccaagcatcatcttgctggggtacaccttggtggggttttgagtgccgggttgtacagtaggattgcaggcgagaggccagagggcagaggcagctagaccaaccctagccacacctacttggccctcaccctgcctctttctctgcagtggggccgacttgcttgctgtcaactcggatgggaacatgccatatgacctctgcgaggatgaacccaccctggatgtcatcgagacctgcatggcataccagggtaagggagggcagcctgctatgaagtgagcacagcacagagttgcagagagcgtcccttaaatcaatgcaggcgaacagattagctacgcatcggcctgcctcgtgcgctgtgctcagtgaataggatgggtccccattcatatccttatctgtgtgattatcaagagcaggacatgagaggaccctggaaaacatgctgcgcagaagggaggtattgatctcattcgtgtcacccacacacgcaggtggccgcagctggccttgtctcatcttcatcagctgtgacaatttgattcaataaatgttcaccataaagatatattcctatgtgggacaataataaagtcaagaatactggagggtgcctgctctgtgccaggcaccacgctggctgccaggggcccagataaacaagatgtgggctgttctcaactcacaaatgaggttcagaaaggaaacagatgcagcaatgagagacctgcgtgccccagcaccccacagatagacctctgaagcgccacctccttggaaatatgtcacatccccagatcctcagctgcagctgcagtcctgccctggccctgcccttgtgtaccccacagagcctcagtaaccgtgattgaatgtcttgttccttgcacccagatcttcctattcatctcctgcagaggttcttaaccatttttgtgccaatctggtgactctatggaccccttctcagaataatgtttttatttttttgagatggagtcttgctgtgtcccccaggctagagtgcaatggcacaatctcggctcactgcaacctctgcctcccaggttcaagtgattctcctgcttcagcctcccaagtagctgggattataggcatgcaccaccatgcccagctaatttttgtatttttagtagagacaggatttcaccatgttggccaggctggtctcgaactcctgacctcaggtgatctgcctgcctcagcctcccaaatttctgggattacaggcgtgaacccccgcgcccagccagaataatgtttttaaatgcagttataaaagtataggattataaaggaagccaattatattaaagcgtaagtaccaaaacatttttcaatgtgttagatagaaacttcgttaattcattaaacaataagataacaggatatgaaaatagctatagtatctgttggtaacaaagttacaggcactgctaacactactgtgggttttgcttacattctaatggtagggaatactcaatttcgtttaaagcttagtcaaaagaaatgtgtgattttatttcctccttttgtagatctctcctgaattcgatcgaacagtgcttggtctaatggatctttttacggagcatgtcatcctctccttaaatactgtttgtagctgtcagtaacacacttttaagacaggaatgggattcgggctatacaatgtctctctgggcccctacctcaattgactcagctctccacttgaaagtaatacattcattcattcagtccttctgcaactaaaattgattgagcgttgtgccaggtgctacagacacaaccatggttaagatgaaggaaactaacagagaccctggtcagatagggtggtcagcagaggccagcttgggagatgatccagtccaggacctaaagaataagacagaggcagccatctgagcagttggaggtgtgtaggtggatggtaaggactttcaggtagaagaacagcatatgcaaagtgaccaatatgaatccattgcctagtgggtgccaggcaggaatgcccttgctctgtgggccaatgcatggtgtctcatcaggcctgaagacaatgatctatgggcatgtctgcatgcccgcttgactggcatatcctagggaacaagagccatgcctccctcatctgccttcccctgccctctggggtcgtaggcctgagggtgctaaataaatcccctctttcccactgcaggcatcacccaagagaaaatcaacgagatgcgggtggctcctgagcagcagatgattgcggacatccactgcatgatcgcagcgggccaggacctggactggatagatgcccagggtgccacactggtgaggagatgggccagtaccaaaaccaagaccagctaggtccgaagtgggccagcacctggtggggaccaaccctgtacccttggggcctgtctgtgaccttggacctccgcaagaatccttttgggccaggattgcccctggatagggagggtcagcagagcagggctcagcctctttgagaacctggcctctctctgggctgggcttggtggctcacacctgtagtcccagctacctgggaggctgaggtgggaggatcacttgagcctgggagtttgagtttgagttgtgattgcaccaatgcactctagcctgggtgacagaaagactttgtctttaataaacaaacaaacaaaaaagaatccagccactctcaagtggggcttggagttaggagcctgggtcggagacctggctcccacctgttcaccaactgctctgtctccaagatattccttcaccccaggcttcatgtgtccatcttgagctccttatttccctctcctctaatgatgtcctccattaaggactggtgtcaccattcacccactcactcgtgctttcttgctttgcactgtccattcccctgccttagtatcacctctcctaccctagcaccccactgccttgcctcatcagctcccctgatattactgcaacagcctctcctttgggttccctgacttcagagtctgcccaccactcccagtcatccattcatccattggtccatccaaccatccatccatccatccatccatccatccatccgtccgtccgtccgtccatccatccatccatccatccatccatccatccatcattccatccatccatccagccatccagtcaacacacagttatgagcacctcctctgtgcacatactttactagaccctggagacagagaacaatgggaccttcttctctctcaaatccgcctggttaactccactcatccttgcagctcaagtgtcactgacttaggaaaacctccctggccactcctcataggctctcagagcacactgcagcctaatattggggaggtctgcttctgcaacctgtaagtcaaaattcagagcatggctatggcagcctaccccactgactggggggtgggtgccctgtcccaggcttaggttccacgctggtcgtaagcactcagcagtctcgggatctcgagctcactagatagggctcagcagtaccagatatcctcactgcccctcaggcctgacctggcagcccaggtgtgataagtgggcttctcccacctgcttcctgagctctcacatctgttttatgcccatttctattacttgggtgcctgcttggatcacctgctcagcctagcactcaagaatggggtcaggtaggaagtctgactatttctgtctgaagtcaaggccaggctgcactagggcattacccagcctcattgcagctccaatggggctgtcattgggtcctctagacacagggatcttctctacctgggctggggctggcctcagggtggccccacccccatgggctgggcatatactaggtctcaggtcttcccagtaaactggagatcatagtgtcttcctcacagtgttgctgggagcattaaatgagattctgtgtgaaagtgcttagcacagtctgcaaattctcaatagatgttagcaatgaccattatttttactaacaatgccactattccactcataccttttcatttccagccaagtagtgaggtttgtaatgtcggactggccagcaggtgtcattctctacaactgacaagcatcagacatttataaatcagataattatactaattttcacatcatacccttgctttttcaagttggaaaaaaaaaaagcttcaagcaaccttctcccaggatgaggtggcatctgaccatcagggctgtgttcagaaggatcacttcctgaggccatgccttctttgtcccactgactctccagcccaagacctcaggcccccgaggttctctggcttcctcccagctagtcttctgctagccgccttggactctcacttctatctctcatcttggctgggcagttgatgtctttttgccttatttccttctctctccttcattcattctcatggtcatcatttaggactctctaagaatgtgaatcccttactgagtgttcattatgggctaagctatttatgtattttgggggcaaattgaacaatcatgacaactgaggtctgccaggcagtggccatgactgaaggccttgaatgggatcacagtccctcattggatgtattatctattgctgcataacaaactaccccacaatgtagcatcttaaaacaataataaatatttattgtctcacatggtttctttgggtcagagagttaggaacagcttaactgggtggctctggcttggtggctctcatgatattgcaaccaagatgttgcaatattgttgagactactggggctgcagtctcatctgaaggcttgactggtactggaagatccacttccaagtcagttcacacacatggctggcaagttagtgctggctgttggcaggaagcctcagtttctcacctctttaggacctctccttgaggcttcttgaggatcctcacaacatagtggctgccttcttctagaataattgatccaagacaacataaagtagaagcagaaatgccttttatgccctagcctcagaaatcacaaacaggatattcacaatatcctacttgttagaagtgagtcactcagtctggcccacattcaaggtgagaacagtcaggctccatcttttaaaggaagatgtgtcaaagaatttgtagacatatttaaaaatcaccatattgaacctcagagaccccttcttcagggctcaatgcacagtaggggctcagtaaatgctatcgctttaaccacatggatgctaagaccaaccacaggggagaagaattcagctctctacctttccttttaagtccatatttcagacttaataatcctctgcaatgtgactggtatttccatttcattctattccattctactggccccaaggatgctgtgggagttgggtgaaggtgagagctagcctaccgtcaatgtggggctgatcccctgaggaatgctcacttctttcctctcctccagctgcacatagctggagccaatggatacctgcgggcagctgagctcctcctggaccatggagtgcgtgtggatgtgaaggactgggatggctgggagcccctgcatgcagctgccttctggggacaggtagttctcacccacagggctgtgggggaggccggcacagggctaacctgctgacaccaagttttttgggctggcagttgttttcaaagaacataagactttaaggcttaaggtgttgaatatagctcatatgtgggatatgaaaaggcctagggagtttgcaaaaaacattggacaaagcaagttgtgttttttttttttttttttttttttttttgagatggagtcttgatctgtcacccaggctggagtgcagtggtgcaatctcatctcactgcaacctccatctcctgggttcaaacaattctcctgcctcagcctcctgagtagctgggattacaggcatgtgccaccatgcccagctaattttttgtatttttagtagagacagggtttcaccatgttggtcaggctggtctcaaactcctgatctcaggtgatctgcctgccttggcctcccaaagtgctgggatgccaccatgcctggctgacaagttgtgttctaataggatggtaatcaaatttgccaaataagaaaattaccagcatttttgcttctagcagtttctccatttgtttccagatacaaaactctgattgtcacttacacctagtccctccttagatacctgccagctctagagttacagccaactctttcttctccttcttcttggtgtggcccaggcatgtggaggaggtgctaagctcattgcatctgtctggattccccccatggctctagtttgcaggccttccctggaaatcaactttgtcccaccattctttgggtcacatcctaagaggccttgggcactctctccacctcctaggctttctgagctctgggcagggggacacatgagcttcttcctgtgtttcagatgcagatggcagagctattggtgtcccatggagctagtctcagtgcaaggacatccatggatgagatgccaataggtaagtccagcacaatagctggtgtgcacaaataggcagttatcaatgttttgatgggtagagggagaaatagataaatatatggttgtatagattgatggattggtgtctagatagatagatggattaattaatggatggtagatgaatggacggatggacagattaatggatagatggataaatggatgaatggatggttgaggtggtagatgggtagatattatgaggtctggttgaatggatgggtgggtgggtggatggatggatggatggatggatggatggatggatagacagaaaaataagtggatgagtgggtaaaggatgaatctatgaatacatggctcagtcagcaataggtagatagatggatgaaggggttaggtagaatagatgggagtatgtagctttattagcatctttgcataatttattgcttgggctatgtggggtacctgcttggggactcttcttggaaactatcaaagagcaacatgaatccctcggtcatagctgggaagcttaggaattgtgactgtgcccagaacctgggtttcccattcttataatcctcttataaacacactcactcaactttggctggcattgttttcttgcctccctgcatgccctgaaagatgcttggagttttcagtgggttggggtggcagctcctctggtctggagcaccctcttgcgccacaggtcctggccccgtcccccacaacagactcctctgccccttcagacctgtgcgaggaggaagagttcaaggtcctgctgctggagctaaaacacaagcatgatgtgatcatgaagtcacagctgaggcacaagtcatccttgagccggaggacctccagcgcaggcagccgtgggtgagtccggggcagggcagccaggagtccctgtgtgtgctcctgcctgtggtgcctgggtgcagcctctaggacccactttgtcctctcaggaaggtggtgcggcgagccagcctgtcggacaggaccaacctgtataggaaggagtatgagggagaggccatcctgtggcagcggagtgcagctgaggatcagcggacctccacctacaacggggacatcagggagaccaggacagaccaagagaataaggaccctgtgagtggcctcacgccctgccctagtgtcagccactgcaatgggaggagaacagggcccagcctggccttgcctcttcaactgagagccttcagagggaagtagccaggcactgcccttaaactagcatatccagtctgatgatgatggctactgtagttaaaccagcagattcagtctgatggtggtggctgctgtagttaaggaggtgatcggggagtgtgttagaggctgagctgggtgctttggcacacaggtaggtctcctaattgacagggggtgagtgtccgctatgcgcctagctgtgctccagcacacctagcagtggacttccaaggagagagcttcagtagggcagtcacccaggagctgagggtgctacaacttctttttcaggaaatataacaagatattgagaattgtgtttatcagaacatgttttttgaaaaatggagtaggatcctagtaggacctctgagaagcctgctcctgtagcagccaatggtcctttaagctttaagctgctttcatttctgatggctgctttaagaaattatcacaaactggatggcttaacatggtggaaatttattctctctcagttctgaaggccagaagtctaaaatccaggtaacaccagcattggttccctctgggggctctcaaggggattctgttccacgcctctgcgagcttctggtggctcaggcgttctttggctcttgctagcaatgattctagtctctgcttctatctccacatgacctttttcttcgtgtgtgtgtgtctgttttctttttttatttttattttattggttttttttgagacagggtcttgctctgtcactcaggctggagtgcagtggcatgattatagatcactgaagactccaactcatgggcttaagcgatcctcccacctcagcctcccaagtagctgggactataggcgggggccatcacgactggctaattttcaaatttcttgtagagatgaggtcttgctgtgttgcccaggctggcctcaaacttagcctcaagcaatcctcccaccttggcttcccaaagtactgagattacaggttcgagccactgtacctagcctgttttttcctcttatgaggacaccagtcattggattggagcccatgccaatccagtatgacctaatcttaatttaatttattacacctgcaaatacctatttctagataaagtcacattcagagattccaggtagacatgaatttttgagggacactacttaacccagaaccaacacactcactcagcatggctgctttcttgctgagtggagtgaacaagtttggggctggagtggaattgctgaggatgagggagaagttaactgtaccagaagtggtctgccattttcgttcttccactacaccacgaacagatgaaaacatgcctagagagtttagccttggtgggatgaaattgattagctaccgagcatgcccacgtgtctcagagggaccctgcttcccagcacgaacagtggggtcacctactgcctgtctcaccaggaggtgtgaaggtgcctgcccaaggggaggccacatcaaagccaccagctggtgatggagagggcacgtagggaagatttgttctgcctggccccttagtctgaggattggtgagaaaagagatgtagatcagtatcaaatcacatttcagatgtctcccagctgtgctttatttatttttcctttgtgattgtggtgtaacttaagtatggtaaagcagacaaatctttttttatttttttatttttttatgatatggagcctcgctctgttacccaggctggagtgcagtggtgtgatttcagctcactgcaacctgtgctcccgggttcaagcgattctcttgcctcagcctcctgagtagttgggattactagtgcccgccacgacgcctggtggatttttgtatttttagtagagatggggtttcaccatgttggccaggctggtgttgaagttctgacctcaagcaatccttacccacttggacctcccaaagtgctgggcttacaggtgtgagccaccatgcctggccaagtagacaaatcttaaatgagattttcaacaaccttttacaaatgtacacactcagatgaattcatagagcattttcatcatccatgttctctctccgtcctttcccccactccaaatgtagtcactatttaactttgagttctaaagattaattttgtatatgcatatgaatgaccctgcagtttctttcgtgtctggctttttttacatctgtgagagtcacccacgttgtggcatatagcagtagtttttttttgttttttttttttgagacaggagttcactctgttgcctgggctggagtgcagtggtgtgatcctagctcactgcagccttgacctcttgggatcaagcgatcctcccacctcagcctcttgggtagctgggactataggcatgcaccaccatgcctggctaattaaaaaaaatttttggctgggtgccgtggctcatgcctgtaatcccagcactttgggaggccgaggtgggtggatcacaaggtcaagagatcgagaccatcctagccacatggtgaaaccccatctctactaaaaatacaaaaattagctgggcatggtggcacgcgtctgtagtcccagctactcaggaggctgaggcaggaaaatcacttgaacccgggaggtggaggttgcagtaagccaagatcgagccactgcactccagcctggggacagagcgagactccgtctcaaaacaaaacaaaacaaaacaaaacaaaattttttagagatggaatcttgctatgttgcccaggctggtctcaaactcctgggctcaaatgatcctcttgcctcagtctcccaaagtgctgggattataggcacgagccactgtacctggcctcattcttgttttttttttctttttctttttttttttttgagatggagtcttgctctgtcccccaggctggagtgcattggcgcgatctcggctcactgcaacctccatctcccgggttcatgccgttctcctgcctcagcctccctagtagctgggactataggtgcccaccatcacgcccagctaattttttgtattttcagtagagacggggtttcaccgtgttagccaggatggtctcgatctcctgacctcgtgatccacccgcctcagtctcccaaagtgctgggattacaggcgtgagccaccacgcctggccgcctcattcttttttattgctttctagaattcgattgtttgaatattaaaatttacatatccatgctcctttttttttttttttaaattgagacagagtctcgctttgtcacccaagctagagtgcagtggcgtgctcttggctcactacaacctctgcctcccaggatcaagcgattctcctgcctcagcctcctgagtagctgggattacaggtgcgtgccaccacgcccggctaatttttctatttttagtagagatggggtttcgccatattggccaggctggtcttgaattcctgacctcaaacgatccaccctcctcggcctcccaaagtgttggtattacaggggtcagccactgctcctggcctccattctccttttggtggacatttgggtttcttgtttctggctcctgtgaataaagctcctataaacatttttgtacatgtcttttggtggacataagcactattttgtgttgggaaaacacccaggaaagcagctggagtcacgggtaggcatatgtttagctttagtggatactaccaagcagttttccaaggtgccttgtacctgtctgctttcccatggcagagtgtttcttgccaacccttggtatagtcagtcttttttttttttttttttttgatacagagttccgctcttgttgcctagcctggagtgcaatggcgccatctcggctcactgcaatctccgcctcccgggttcaagtgattctcctgtctcagcctcctgagtagctgagattacaggcacctgccaccatgcccagctaatttttgtgttttagtagagatggggtttcaccatgttaaggtgggaattctcaaagcatggtccctgtaccagcaacatcagcatcacctgggaacttgttagaaatgcagactttggctgggcacagtggatcacaaatcctgtaatcccaaaactgagggaggctgaggtgggaggatcttctgagcctaggagttactggacaacatggcaagaccgtatctctaccccccaccaaaaaaaaaaaaaaaaaaaacaattaggtgggtgtgatggtgtgtacctgtagtcttaggtcttgtgaggctgaggcaggaggattgcttgagtcgaggaattcaatgctgcagtgagctatgatagcaccactgaactccagcctgggtgacagagtgaggcgtggtctctaaaaaaaaaataaaaataaataaatgtagattctcaggacccactccagatgtggcgatactgctgcacacaagaatttcagaaccacttatttgaggaataatttgttcagcctgacccccaaatcacatttcttccaaggctgtgccctgttagccttcagggatgactttggttcactgttttttgtttttgtttttttcctctgagacaaggtctcactctgttgcccaggctagactggagtgcagtggcgcaaacttcgttcactatagcctctgcctcccagattcaagcaattctcccacctcagcctcctgattagctgggactacaggcacccgccaccatgcccagctaatttttgtgttttttggtagagatggggtttccccatgttggccaggctggtctcgaactcctgaccttaagtgatccacctgccttcgcttcccagagtgctgggattacagacatgagccactgtgccccttgttttttaatctgatgtttaagtagcagtacagacaaactaaatcagaatctcaggagttgggacctcagcattgtatatgtttgtcattggtgtttttttttaattttttttagatggaatcttgctctgttgccaggctggagtgcagtggctcaatcttggctcactgcaacctccgcctcccaggttcaagtgattttcctgccttagcctcctgagtagctggaactacaggcgcacgccaccatgcccagctaatttttgtatttttagtagagacggggtttcaccatgctggccaggatggtctcaatcccttgaccttgtgatccacccgcctcgacctcccaaagtgctgggattacgggcgtgagccaccatgcctggccatgtcgttgttttttaaagctaaagagagactgtttttgaagtgattgcagcagtaagtagaatgcatcgaccacagaattggcaagatcttggaggtcaaggagaaaggagttcgtttcctagggaggaagacagaggctgcaaggactgagggttgggggtgggatgagcaggtggtgtaattggacagttgaccaggaatgtgtgtctggtggtcagcccatttccagaacggtcttcaggagagtttttctgcattgcagtgcttgtttaccctcagggtgagtcaaagtccaggatcctgtggggaggggagcagcttaactaaaatttggttaaatcatttaccgctgggcgcagtggctcacgcctgtaatcccagcactttgagaggcccaggcaggcggatcatctgaggtcaggagtttgagaccagcctggccaacatggcgaaaccctgtctctactaaaaatagccaggcgtggtggcaggtgcctgtaatgccagctacttgggaggctgaggcaggagaatcacttgaacctgggaggcagaggttggagtgagccaagattgcaccactgcactccagcctgggcaacagagtgagactctatctcaaaaaaaaaaaaaaatcatttagcaagcatttaatttcggttgataaattgacagtttaatcatttcagaggaaaagaatgagaatttgggggactgtgtttgggttgtcctaggaaaaggaggggtcgtctgagcgttctggaaatcctatggggaagggtgattctgtgcagtcagccattccccagaacacaaaatgtgggggttttgtttaaccttcctgttgtccagtatctcagttcaacattgccaagatgatggtgcctaccacaaagggtgttctagggtcaattgtgttcttatttgtatagaactcagcccataatttgtacctcattaagcattaggcagataagtacatttagaagttccctgcatcatgagaaaacctctttcgtctaacccacatccttcaggctggagttaattcctcttccttcaatgctctgatttctgacactggagatggatataggtgggttttgttttcttttgttgagacagggtctcattctgacagggtcactcaggttagactgcaatggtacaaacatggctcactgcagcctcaccctcctgggctcaagtgatcctcctgcccagcctcccatgtagctgagccacaggcacgcaccaccatgcccagctaatttttaaatatttgggtagtgatgaggtctcactatgttgcccaggctggtctccaactcttaggctgaagccatcctcccacctcagcctaccaaagtgctgggattacaggcatgagccactgcacccagcagggatttttttctttttaaactaatagattttttttttccgagcagttttagaactctagaaaaatgagtggaaagtacagatatttcccatatacacccccctccaccctggtttcccctgttattaacaactagcattagtgtggtacatatgttatcactgatgagccaatattgatacattattatgaactaaagcccatagtttacatcgggtttgctctttgtgtcgtaactcctgtgggttttgacaaatgcataatgtcatgtgtccgtcatgatagtgtcacacagaatgctctcgccacttggtttaggtggttatattagacagttgagattgtgaacaactggtgaaagagaccagggctgtcccactaaacagccctggtattctacttacgcttcctccccaaactctagcaatcactgatcttctactgttttcataagtcttgcttttccaaaatgttatatacgtggaattatataatatgtgatgctttcagattggtgttctatatggtttttttttgagacggagtctcactttattgcccaggctggagtgcagttgtgcaatcttggctcactgcaacctctgcctcctggttcaaacaattatcctgcctcagcctcctgagtagctaggattagaggcctgcgtcactgcgcctgtctaatttttgtgtttttcttttagtagacacaaggtttcaccatgttggccaggccggtctcgaactcctgacctcaagtgatccatccaccatagcctcccaaagtgctgggattataagcgtgagccaccacgctcggcctgtacatgtttttttttaactgtctagatgatgccaatgtgcatccaagatgggatcagtgtctcagatctttgccactctaagcatcagcaggaaattcttagaagtgccaaattgcaggccccaacccagacctattgaatcagaatatggattttaacaatatccctaggcaactcacatacacatcaaagtttgagaagcactgactaggaccaccaagaaacggtctctccatgacatggcatcagtctgcctgcatagttcagaaggagccattaaaaaaaaaaaaaaggttggactcggtggctcatgcctgtaatcccagtgctttgggaggctgaggtgggagaatcatttgagaccaggagttcaagaccagcctgtgcaacatagtgaggccctgactctaaaaggagaaagcgaagaaatacacactcataaatggaaacttactatggaaagtgttctttgccttatcacatattaccatatatatatataacatatatatgttatatatgttatatatgtatgttatatataaatacatatatatgttatatgtacatatatgttatatatgtacgttttatatatatttatatatgtatgttatatataaatatatgttagaaaactagattataaactagattatatatatatatcttggacatctttccatgccagcttgtggagaattccttcattctttttgccagctacagagcatgccaatagaagtactggccacagtgtcctgcttgcccaatgatgactttcaggctttgcactaatgagagagaaaatctgtgaaatgggcttgctggtgcaaagtatacaatcttttctaaaaatttttatcattattattgtttttattttttactgaagagctggggagagaagaaaggaaaaaaagaaaaaaatttcagtgaaggatgatgcaaaactgtccatcaaagagactgtagcaatttacattctcacttatttccccatacccctgccaacactgagtaataacacactttaaacgtatttgtcagtgtgatatccaaaagtgatattttgttgttttaatttttatagtattaacgattagtggggatgaatattattccaatgccatgtatatctatatattttgctgtgggctacatattagtatcccctgcctactatttttattgggtagataggcttttaaaaattgacttttggctgggtgcggtggctcatgcctgcaatctcagcactttgggaagctgaggagtgtggatcacttgaggccaggagttcaagatcagcctggccagcatggtgaaaccccatctctacaaaaatacaaaaatttgctgggtgtggtggtacgtgcctgtaatcccagctactcgggaggctgaggcaggagaattgcttgaacccgggaggcagaggttgcggtgagcagagattgcgccactgcactccagcctgagagacagagcaagactccgtctcaaaaaaaaaaaaaaaaggacttttaagagctctttatacttttagaaaattagtctcttttctgtaatatatgttgaaaatattttcctagtttcttcatgtgtcttttgaccttgttccctgttcatggtgatttttgctgtgctttaaatgttgttgcatgtatctattttttagtttatagtttttaggaagcagctacttttcaaactcttgttatccaaggattattaggtgtacaggatccctgggtaagaatctttgtgagatatgcttcatatacagaggaaggattacaagtgactgaaaaacccaactcaaatggacttacacacaaggaatttattggcttgtgcaactgaaaagtctgagcctggaaggatcctggacttcaaatgggtcatcaggatgcagtctctcttagcctttcttcatgccaactttacttgcaagcagacccttcaacatagtatctccccagccctcagcttacgtcattcttactacccacagttcctacagaaacttctctttcccagttgttctagcaaaagtcccagggttgcttcactgaagcaatttcagttaagaactcatccctgggccaatccctgtagtgaaatatgttgactagctaggccttgggtcatgatccaggccctggagcaaggccaggggtcggtcaactgtacggaaattcatagattgggggttccccaaaggaaaaccctggccccgatacccagggagagaaaacagatagaggaaaagtccaaacaataatgccctcagcagagagacaggtggatagtaggttcagatcttccagccagctggtaatgttgtccttctcactcgcagaaccccaggctggagaagcccgtgctactctccgaatttcctaccaagatcccacgaggtgaactggacatgcctgttgagaatggcctccgggctccggtcagtgcctaccagtatgcgctggccaacggggatgtctggaaggtgcatgaggtgcctgactacagcatggcctatggcaaccctggcgtggccgacgccaccccgccctggagcagctacaaggaacagagccctcagacgcttctggagctgaagcggcagcgggctgcagccaagctgctcagccaccccttccttagcacacacctgggcagcagcatggccaggacgggcgagagtagcagtgaaggcaaggcccccttgatcggaggcagaacttcaccgtacagcagcaatgggacctcggtatattacacggtcaccagcggagatcccccactcttaaagttcaaggcccccatagaggagatggaggagaaggtgcatggctgttgccgtatctcctagtctccgtgtgatggaggagggagatgcctggggaggggctcctggaatccaggccagcccaacagccctggctggggaggtgtcagggcagctggggagaggtgggctctgcttttcagaggaactcagaccccagccctcagctggctgcccatagcatcccatgtcccacgtcccgtggttctgcttcctgctgcatcgtctgccatctgacacaaggcctgtcgtggcctcctggttcactctgctgtctgatcttgggagggtgggcttgagatcccagctctattcttggtataaaggcttctccggatcagtacatgcatgtcacattaacacacacacacacacacatatacacacacacacaagctcgatcagtgtgtgtaggaatgacatacctgggctcaggggaagcaagggggcttagaatttgtggggtattcccaaaaggatggaagttaagactcagagtctcattaccactgccaatgtggttttagcaggggaggggacctgctaagctgagacccatagtcctgctcagagttatcccaaagtctgagccaccagccacacctgacaggggtgagaagtcctcgctgtgttcagagggagccaggaatctacatgggtagatgagatagacacagacctgctccccgcagccttgttgagagccacacttctgcccatgccaggagccagctgtgtgaccatccaggggtggagggggaaaaccaggcaatttcgttcctggaatcaaccaaatcatgttttcctcttggatggaagtgtcaaaggcagaagggtgtgggagggggacaaggtcagtatttaccaaagtgtatctgattttaaaaattcctttagtctgtaaaactcctagagggagggaggtaactgaattcacttctttttgtggatcgtatcaaggtcactgggttttactggctggtgctgggaaaatgaagctaagtgaggagcttccattggaatgcttttccagggagagaggccagttaatttaaaaaaaacagtcgctagttaacagcgacagagcccagcaccctggggtctttgtgaatatccagactgtttcagcccagcccatctcagccaaccctccttagactgagctgtcagagcaagcaattaggggccagcctgcctccacctcccacccccttccacctccatcagtcatgtgtgcagagtcagtgctcgggatcccgggcccagcttttgcctttttggggatgcttggtgagacagatttgccagtcagcccttttgagttcccgcctcacccaggggctcccagcctgcacttgcaggagtggtgatgccccaagtctgcgaatccagggtgcacgtggtcaatatcccctcctgcattcaggagagccatggtagggctagagttgggtcttgcccagccctgcagtttcatagtcccagccttcctggtgctggggagggaggactgtgaatggctgttctcccctcactgctgagtctcccaggaccccctttggagatgcccatggcatgggcactgcccacaggctcagccagaacctcttggtgtacccgataagctgcaggttatcccttgctctgtgcgccttttatttgtccttaaactacctccttagagctctgaaggggtctcctagttccagattttaatttggggaacagatctgggttctttttaaccctcttctttctcagtctatgagaaacttgccctgaggggcacctgggctaggggcttgggactggaagaccatccccgccttgtgccacaactttggtcatgggatctgctctttgtcattcttagccccctactgtggcccccatagccccataacccagagagggagctggacttcagggagcctgagtgatgctttcccaggagcagggcagctggctggaccagaaagtagagggcccatgggagtgactgcacccttggtggctgctggaaggggagaggttctcagcatcaggccacctccaccccaatgccaggatagatgtattctagagtaggggtggaggcggcccaggaggctgaagacaggtgcacagatgcttcccacgaccttgccatttggggtgggctcttcaacatctcaggctgtggctggaacaggacaggatgatctaaaacacacgtaccattggctgtaaaacagtatgagcccagactgacgctgaaatccctcatgagccaaccttagctacaaggtagggagttctgagggaagccgcgtgctcctcaggagagagctgtttaggttttccgatctttttgctcaggggccaaacactgaaggcacgtactgcccaacccactgagcgcctgaggccattccctccttttccgcatgcctcctgcctcctgggctattcctctccacccagaaggctgggaatcccagctgattccctgacaggagccgacttcacacacaggtgactctcaggcattggctcatgttttcagccagggataaaccatcccttcttggggctttaagtccctggggagctttccctgtaggtctcctgggtgttgagagacaagttggagaccaacctccaatgaatgagccgcggtcattcattaattcactcacgtaatttactgagtagctgcaacatgccagcctctacgttaggttctgcggataaaggaggaataagacagagtcaggagaactgttccttgtggtttccgtcccttggggaccacaggcatcagcagtcccattcaagtcacctgaggcaaagtgtctgcatcttcgtccagcgaccctttgcttttcggctcctagaatccttagagtctgaattcctttagctgggaacagctgtcatggtcacccctggataacatttgccaccaagtatagatgctggatcttgggttccaggcagacatcatccaggtccatctggaactttcagtgatagctgccttcagccagcatctttgggggactctataatagcagcttgagatcagtgtctagaagactgttctgcaatttgctgccaaatgcatctcaggtttttaaagtcattgtttcttgctcatggtggctcatttattacatagtcccctcaccccactaatggataatgggaggaaaagttgctgcttccttcagcatcaaagcctttccttgggaatctgcctccctccatggcaggggtggattcgggagctgggagtaaccaggcaaagtcaaccagatgcctagctcctgctgagacccaggtcctatggcagctcctcattagattaaaggagaccacttccaaagcaggtgctgcatggctcaccatcatatgccccaaacaactgaaagttggcggttatcaccagactgtgagtttctggcaagtagcttggggaagctgaataaactctaggcccagggctactaaagacttcaggatagaattctccatcaaatatacagcataagtaaaactgctctgcactgtttaatccatttccaaggggcttagaaaagctaacaagggtgtgtcccctgtcctgccccaccggtttgctggctttgtaataacataagaccattgtggttgttggtgtcagataccttcccatcctgagctctctcacctacctgctctctctcctagagcaggatactggggtacttttaagaagggtgctccttttaagatgcccagaaaagctgtatttaactcttgctatttgtaacttggggatggtctcccctgccccagggcacataagagcaaaggctccaatggtcagtggatgactctgcaaaagtgaccccctgtgccagaagctatagccctctccccaacaggtctctcttgttggccagagggcctgcttcccatgggcattgcaagtgccaccgtgcggggcctggctctgcacacccaggaaaagtctgcagacccccagccctccgcaataattcaccagaccagaagccactggtgtacagagaacacttaaaaaaatgtattttatgtgaaaaaaaattaaaactctgtatactgtatcagcagctttgtgtaaaaatggcaatcaagagagtctaatatatttaaaacttttttaaaaaaaatcttcgcagatctttgatatcgtactgaggtaacttccacgtagccccttgccacgcggcaccggtgggccttgggtccaaaactgtggctcagccacatcccaaagggggcacatgtccctggagttgcttccagctgccaaggcctgtgacagaattcgctgttaagagtttttaattaaaattattaaattccttttaataacacctgctagtgtgagtgattattgctgtgagctcacttgaacagtgctgacttgaattcacaaagaggaggttcctggaatagagggtgggtgagagctcctagtctcttcccccttaccccacccctttcccacagagggctttcccatgagacccctgaaatagagggagctctgggggctcagacctggagcagatgtctccccagactaggagatggtgaaaactgatgaattcaagaaaaggtgggtggttgggaatgaccttcattctgtcaaataatctctttgaaattaacatgaggccgtatagtagcatatatttattccatacattttcaaagtttttcctgatatttatttatttatttttatttttttaagatggagcctcactctttcacccagtctggagtgcagtggcgtgatctcagctcactgcaacctctgcctcccgggttccagcaattctcctgcctcagcttcccaagtagctgagattacaggcgctcgccgtgatgtccagctaattttttgtatttttagtggagatagagtttcaccatgttggccaggctggtctccaactcctgacctcaagtgatcctcccgccttgagctcccgaagtgctgggattataggcgtgaaccaccacgccccgcctctcatgacatttatatgtaacaagggtgcccctctcctctgtcccattcttggagtgaactgacatgtcctgtcctcttccccctgccccattccactctttcccctcgtgtgcttattgtggggaagtacgatactataaagtacttcaccttatgacagcaatacagcagctaaggccccggccattctcattttttacctcgagcattaaaggcatagagaagctatgtggttgcacagcctcagaccacagtccttggtccttgtcccacacagaactttgttggtgtttttcttgaaagaggatgaaaagggtgtcggatcacaaggtcaggagttcgagaccagcctggccaacgtgatgaaaccccatctctactaaagatgcagaaaattggccaggtgtggtggcatgagcctgtaatcccagctactcaggaggctgaggcaggataatcgtttgaaccctggaggcggaggttgcagtgagccgagatcacgccattgcactccagcctgggtgacagggcaagactccgtctcaaaaaaaaaaaaaaaaaaaaaaaaaagaaggtgctctcttgcagcctcccggaccctggataccagcgcagggacacatggaagtccccacacttattcttgagaaacttcacaaagggatggggatggggagaggagaggtagagagggagaggcgtctcaacagcggcaggcattcatccatttaaaaaggttattggttgctaaataataatggtaacatctcacatttatgacccacttttcatttacataaaaaagatgacgactgaaaattgactgttggatttagctctgtggaactcatgatgaacctgacaagaggttttggtaaagcagtgggggttttagcctgattgaagagggctggaagggaactggagacagcaagtatagacaactggtttgagggtttcttttcttttcttttctttctttctttttctgagacagggtcttactctgtcacccaggctggggtgcagtggtgtgatcatagttcactacagctgcaaactcctgggctcaagtgatctcttgcctcagccttcccactggctgggaccatcatgagcactgccatgcactaaaagttaggcgcaccaccatgcccagctaacttttgtatttttttgtaaagacagggtctcactatgctgcccaggctggtctcaaactcctgggctcaagtgatcctcttcccttggcctcccacagtgctgggattacaggtgtaagtcaccatggccagccacatctgagattctatgctgcaaaaataagaagtgagatggggagctttagaggaatgtagggtcaagagagggttgttttaagatgaaaaatatttcagcatgcttgtaggctgatagaaatgaatcggtaaagagggaagctgatgttccaggagaaagaagaagattgctggagcgatgctggtgagtagtagaggggctggaaatgcccaggcagaggggttggggttggatgggcacaggcacagttcatcaatgcccagtatacgggcagagatgcagacaggaaggtagactagatggccgcacgtggacgttcccttcttactgtttctgtgttcttgctgacatggaagacaagctgtcagagaggaaaaggtagagagaatgagggaaatgcggcctaccaggcagtttttttgtttgtttgcttttgttttgttttgttttgtttttagatggagtttcgatcttgtcgcccaggctggagtgcagtggtgctatctcgactcactgcaacatccgcctcccgcgttcaagtgattctcctgcctcagcctcccgagtatctgggattacaggcgtacaccaagacacctggctaatttttgtatttttagtagagacggggtttcaccgtgttggtcaggctagtctcaaacgcctgaccttaggtgatccgccctcctcggcctcctaaagtgctgggattacaggcgtgagccaccgcgcccggcctcctagcaggcagtcttacggattatgaatttaaaacatgaccagtcagtaagcatggttacgctctttttgttttttcttcagccctgtagggctgccggggtgcaggtggaaagtagggtataaccacggttggttggggttttacaaggcaaaaatcgatgaaatgagagaagactacccgagggtgtaatcaaaggagcagtcctaatacgatgagccggtattctttgaatgaatgaatacatggttaaaggcaggtgataaaggcgatatggttggccatgccaaagcactgagagcctaggagcagcgtggccagagtctccgggagtcggcacctgcctctcctcgttgtctaggcctgactgtccctggccttgcacggccgcgcagcggggcgaccggcagggggcgcgctgggatggccaggagctcggctctccccgctctgtccctgctctgcggcccgcctcgcccctgcaagtttaaattcctcttagcaagcccagcatcgcagccaataacgcatcagggggcggagccgtagaggcttgcgccccgcctcgctccgctattggaaggaaagcagccaatgggagagccgaggcggggaggtgcggccaatggcgcgggcctgtttgattcaaaggttgcctataaagcgggactgcacgccggtttttgtccgagggctgtcgagtccgagcgccgccatggctctgctgtccgagggcctggacgaggtgcccgccgcctgcctgtcgccgtgcgggccgcccaacccgaccgagctgttcagcgagtcacggcgcctggctctggaggagctggtggcgggcggccccgaagccttcgcggccttcctgcgacgcgagcgcctggctcgtttcctgaaccccgatgaggtgcacgccattctgcgcgcggcggagaggccgggagaggagggcgcggcggcggcggcggcggccgaggactcgttcggctcctcgcacgactgctcttcgggcacctacttccccgagcagtcggacctggagccaccgctgttggagcttggctggcccgccttctaccagggcgcctaccgcggcgccacgcgtgtcgagacgcacttccagccccgcggcgctggcgaaggtggcccctacggctgcaaggacgctctgcgccagcagctccgctcggcgcgagaggtgagcggccctccagggccctgggtcgcacgggagacccccttcaagaatgggaaattgaggcctgctgggagtacgggccggggccactacctcctctgcgccctaccggaagcgcgcgcgggctaggtggtcccagggtctccgactcacaccccactctgcgtgtctcccccggatcccccgggccgctcctcgtggcaggggatagtgggaaagcctcggttcccaaggatgcgaattgtgcccgggttccatctcctaacgttcatatccctgaaggagggaccagaagtactctgagttccaaatttcagttaaaatcaaacttggaaaattgcctatttccctgtctgtcagccaacgctagatcccactttcaggagcttcttaggagactcattaccaaagaacttacgcagggaaagttccagaaagatggtctccagagacaactacggggcattaggaagcaattattattgctaattactttcatgcatcttttgctgtaaaaagcagataaacacgagagtggcaaagtgagagccctgccgctttttctttcttgtcttttttttttttttttttttttgagacagattctcttttgcccaggctggagtgaagtggtgggatctcagttcactgcaacctccgtcccccgggttcaagtgactctcctgcctcagcctcccaagtagctgggattaccggtgcccgccaccacgcccggctaatttttgtatttttagtagagacggggtttctccatgttggccaagctggtctcgaactcctgacctcaggtgatccacccgcctcggcctcccaaagtgctaggattacaggcgtgagccaccgcacccggccccctgccgctttttctactgccagagactggaggggaaactggggcaaggggtttgttttccataggctgggtctgtgccagattgcagtggtctcctaaaatgcagatacatttgcattagatcggcttctgtattcatagtgggttttggtcctactgtctgactcttagtatggcatggtcatgggtgcaatggaggtcttgtctgcttgccagcctcgataaagctgcagcagggtgctggggatcaaggaggaagaaggcagcctgcaggtgggtgtggcacatagagtgtcgtggcagacaccttggtctggagccatggtcaggttgcttgctgactggcagtgcccagctccctggctatctgcctgtgccagggacatggcagataaagccccagccatgttaagacttgttagggctggtacctgagtgtgtctgagtgtgggtgaagataccagtgcattgtcaggttgacatgtccaagccccgactctcaccaatgttcttaatgttctttccctgactggtggggtttcagtggtagtggatacagtgacctagtgccttgcctttgagggagtggttgtgggctgcagctaggctcttaccagccctgaggtgctttgggtggactgagggttttttgatgcagcagacattttccttgcgggttcagtgaaaagattaaaaagatggaaaaggcagacttgtgtaggtatgcatccccaaagctcatgtccagtagaacttgagcacttggaacctgaaaaatgtaaagaactggtctgtatagtgagagctgtggattgttctagtcttttgcccagccccaaattttagtgatagcaaaagggcactggaactagaggccagagggaaactattaaactcacgtgctggcgtgaggaggggatggagccaggagctcagactctccctcatctcacgggcattttgtaatactgacatttccagatagaacctgctgccctagtctagctacccacagttccctccgagatgctgtatttggaacctgggcagttttaactgagaaaggtggtacattacctttaaatccaatgagtattggctgggcacagtggctcaagcctgtaatcccagcactttgggaggctgaggcaggcagatcacgaggtcaggagttcgagaccagcctggccaacatcgtgaaaccccgtctctactaaaaatacaaaaattagctggacgtggtggtgcgtgcctgtaatcccagctacttgggaggctgaggcaggagaattgcttgaacctgggaggtggaggttgtagtgagctgagatcacaccactggactccagctctgggcgacagagcaagactccctctcggaaaaaaaaaaaaaaaaaaatccaatgagtattttcagtgtgtccgatagatgccaaattatttgcttactcattgcctgctgtgtatcagacactaccatggctggggccacaggggaaggcatcatccttgccaacacttgagagtggacagtgtgctgatgggaaacagtgaggagtttgctgcaggtactgcggaaagggctaaagaaagaaagtctccggagtggcagtgacctcagagctgggtggggcttgccagacctagggtatgggggctggcccacaagtgtttaaggacctggaatgtttgggggcagccaaattccccacagcgggttagtggtaggagaggaagctggggtaagggatgctgaaatgagttgggtttgagacagtgctgaatttgaggtcccaaagacaatctcttttgtttaaaaaaaaaaaaaaaagccaggccatggtatcatgtgcctgtagtcccagctactcaggaggctgaggcaggaggatcatttgagcccaggagtttgaggctgtagtacactatgactacgctgtgaatggctactgcactccagcctgggcaacacggggagaccctgtctctttaaaaaaaaaaaaaaaaaaagtaatgctttctgtttgccaggcactgttctaggtgatcccaaggaaggtgcgattatcatcttcattttacagctgatagaactgaggcatagagaagttaagtggccccgaagtcatgcagctagagaatgaaggagcctgtactcaaattgaggcacagaatgtctgaaccactgttaaccaccacactccctgtggagggttcaggagcctgtgctcaggtggggagaggtgacagcagatctggtggctagctaagagctactactatttatgggcatgcattgtggacaagggagtggctgtgtcaccttgaccacatcctttgaaatctagtacctgtgacagcgaggaccatgaaggtgtaggtctcaggctgctttcaggatgaaatgagaagctgttctgcatccgtgttctgatagcaaaggtacctaatggtgatatgattgagcactttgaatgggtcagtttctgtgctaaacccttgacctgaattacctcatttaaccctcccaacactgggaggaggctacaattaagaaaagaccaggcacagagaagttaagtaacttgcctgagatcacacagttagcatgggacagagctgggctcaagcccaagtctgtctagttccagctctgaagctcaagtgttttttttttgttgtttgttattattttttttaagacagagtcttgctctgtcacccacgctggagtgcagtggcatgatcttagctcactgcaacctccacctcctggattcaagtgactctcctgactcagcctcccgagtagctgggattacaggagcacaccaccatgcccagctaattttttctttttttttttggagacagagttgctcttttggcccaggctggagtgcagtggcacagtctcagctctcagtaacctctgcctcccaggttcaagcgattctcctacctcagcctcccaagtagctgggattacaggcaccctccactaatttttgtatttttagtagagatggggtttcgccatgttggccaggctggtcttgatctcctgacctcgcgatctgcctgcctcagcctcccaaaatgctgggattacaggcgtgagccactgcgcccggccaatttttgtgtttttagtagagatgggtttcgccatgttgcccaggctggtgttgaactcctgggctcaagtgattcacctgccttggcctcccaaagtgctgggattacaggcgtgagccgctgtgcccggccactgaagcccacactcctaatccctgctgcatacagcctccctgccatgaggaaggattggagctttggtagttttcaacaggctgaaggtttgtaacagttgaagattgggactttttaatttccatgttgcgtattctataaacaggaaaatgacaatgactagacctgtccttttcaggaagaaaacgaggtggtcagtttttagagtaggaggcattaaggctggcagagaacctcctcaacccatcaagtggggaaggtggttcatgatgccaggagaacataggtctctgagtttaggttttgtaaactagagtgtgttttcctctccctgggaaagatagagccagatagatgtttctggtacctggagcagagggatctgtgagaatcttttggtgggtgaatgaaggaactttgaatgccacatgaagggtcccacttaaccccagaggttggggccaggctgcagtagagcacggtcgaacctcagtgttcgctccatgcagctttatctgccttcactgaggtggtctgaggaccaccctgcatcttcaggaatgtctctggaaggagccaggatacgaggctccttgaccagagtataggcacaggaagccagggttacttggtaaatggtagggcctaatcctggctttgcagcctgaagcgctggttctgggataggttttatccagcagctctctgaccacacagaatcactcagtgtgtctgatacataaaagatgctcagtaaatactgtaggggcctattatgtgcacctttgctcattcagctacatgctttgaggagaaataaagggcagggggaagggagcggtagataggaagaaaagtagttcaggtgattctgtctgcctttccactcagcaagtatttgtccctgggtggctgtgcctggggtttgtgaatctgccagccccttccttgactcttgtttctatatacctttcaaagtgtgggcattctgccacactgaatgaggtacagtgtttaaaaacaaatggtttggccatgcgcggtggctcatgcctgtaatcccagtgttttgggaggtcaaggctggaggattccttgaggccaggagtttgagaccagcctgggcaacatagcgagatcccatctctacaaaaagttaaaaaattagccgggtgtggtggcatgtgcctgtagttccagctactcagcaggctgaggcaggaggattacttgagcccaggagttggaggctgtagtaagctatgatcatgccagtgcactccagcttgggtgacagggcaagaccctgtttctaaaaaataaataaaaacacaattacgtatagcatggcttgaatacaagctggctgcttaccaggtgctcaggcgagcttcaccaaaattggaggaaatactgttttgaaccttttgagaacccatatgtttgtttcctaagcaagtttttggataatcttgaattatacaggatattttccctacatacttgctgtagatccacccctccaccactgtatctgttgatgacgcattcagctttttgcctctgttgctgtgtgaactgggatttggctgggctgtggccgcctgcctggaagggctacatagcctcattttggcaatgtgcttatgaattggctgtccggctattcctggtttgttgaatgagagttcagaggcaaagctggtaccaccacgaggttccaattcctcagagtcacgtttcttaccagtgcctattctcttttgttccaaagaggccacttttgctatgacctcaccctcgggcatcctcttgataacctgagcgttagtagtggggatcattgcgttcccagagagccctgccaggaggagtagcagcttaggaatctgttgggggcccctggcatttacttggatgtatctgaatgaaggctttcctgttcttgcacaactttcctctgcattacagtagagcctgtgtggtgtgatcagtttctgttccaaatgctcatgtcagccccaagcagggcttctcaccctcagcactgttgaccttttgggttggataattctttgtcctgaggggctgtcttgtacattgtaggacgttgagtagcatccatggcccccattcactcgatgccaatagcatccctcacaccaggtagtcatgatattcagtgtctccagagtgggaaatagtgagttactgatgaatgggcacagagtttctgtttggggctatgaaaaagttttagaaacagatggtagtgatggttgtgaatgtaattattgccactgaattgtacacttaaaaattattaagatggcaaacttatctattttaccacaataaaaaaatgtctccagacattgctaaatgccctgtgggggcaaaatcgccctccagttgtgaaccactggcctagaagttctcactagtgcatcattatgggacattacccactggactgaagtgttgctactatttatcccttccttttgatttcatgtgtcaggttaaggattttagaatttagccatttctctttaaaaatattgtggtaaaaaatacgtagcaaaatttaccattttaaccatttgtaagtgtacagttcagtggcattaaatacattcacactgttgtgcagctgtcactagccgaatctccagagctgtttcagcttcccaaagtgaacctctgtacccattaaacactagctcttcataccctcctttcctggccccggcaaccaccattctactttctgtctgccatttctttctttctttttttttttttgagagtctcgctctgtcgccaggctggagtgcagtggcaccatctcagctcactgcaacttctgcctcccgggttcaagcgattcccctgcctcagcctcccaagtagctgggactacaggtgcccgctaccacgcccggctaatttttttgtattttagtagaaacagggtttcaccatgtcggccagcatggtctcaagctcctgacgtcgtgatctgccctcctcggcctcccaaagtgctgagattacaggcgtgagctaccatgcctggcctctgtctgccatttctttattcttttcccttagcgtctagcagacagtaatgaagctgcagaattcttctctgacttctttatggatagaaggtatgttacttcaggaaaaaagcaagcaaaacccaaaaatgtagtggatatattggcttaaaaaaatcttgaacccggtctctactaaaaatacaaaattagctggttgtggtggtacatgcctgtaatcctggctacttgggaggccgaggcaggagaatagcttgaacctgggaggtggaggttgtgatgagccaagatcgtgccattgcactccggcctgggcaacaagagtgaaactccgtctcaaaaaaaaaaaaaaaaaaaaattcttgatgcaaatgatataacctctggaagggaatttggcaatatctagcaaaatttcagttatatttacccattgatctaccacttccacttctctgtatcttgatatattggcaaaaatatgaatagttgtagacaataggccatgcgttgcaacactaattataatagcaaaacacaggaaagagttcaggtgttcgtcagtagaggatgagttcatcattgtgaatgaaccgattcgtctctgcagtggaacatcctgtagctctaagaaggaatgaggactagctctgatatgcggtatctagaatggtactgaccagtgtagtagccatatgaggctattaaaatttatatggattaaaattaaataaagattcagttctgtcatcttggaaggttctattgggccacgctagtctagaacaatgtgtagtattccatgctaccttttacctatagggggatataagcacatatacatagttatatacataatacacatgtttatataaaacaaatatgtttatatacacctgtgtatacttgtttatattgaaaaaatggaagaatatacaaaaaactattggaaatattatctcaatggggaggagggacaaggatggaaactaagtatctttgaaagtaccttgttttgtaaattggattttggaactaggcaaatgttttacatacttataaaataaaaacaattcaaaatgataagccctcctccccctaccccctaacttcttggtgcttttccctcccctttgaaaagcccacctgcttgtgtacttcatgctggaatagtacagagtactgaatagtggtcagtccctccagagatcagtgaaaactttgctcctgccaccctctggtggccctgccagcactttcatctaatacttaaattgttttatttggttgcttgtttgtttgtttgagacaagttctcattctgttgcccaggctagagtgcagtggtgcaatcatgactcactgcagcctcgacctcccaggctcaagtaatcctcctgcctcagactcccgagtaactgggacttaaaggcacatgccaccacgcccagataattaaaaaaattttttctggagacaggatgtcaactgtgttgcccagagtggtctcaaactcctggcctcaagtgatcctcccaccttagcctcctaaagtattgggattacagatgtgagccaccgtgccgggcctaaattgttaatttgataatagcctctgaaacagagggagaacagtgcacacaagcaagtttaggtttcgctgtgggaatttacattcttttttgtttttaaaccccaaagatgtcaagatagttacttaaaggtttttgacaaaatcccaaggagattatttctgttctattaaaacatgtaatacatggagagaaaatatatcttttgcttttttagcaagagggtcctgagagagttaggagaggaagtgaagggtcaatggaggccatgtggtcagctgggagaatgcagcagccaggatgttattgaccacagcacaggctgacattgagtgggtgcagatctttggtggaattccaagcatgttgcacacctgacctcactttatgactctgggagggaagggagggaaactgaggtgcagtgagaaggggtgatcggtacgaacttcctccttcacacagaggaagaagagctagaatgagaactggaatgactggccctgaggggcctgttggggctgcacatgtgcctggtcagagcctagacctgcccattgagtgtgtatgaatcactgacttcgcagagctggaagggttccttgtttcaaggacaccgagactcagatggaatggcttgtccagggatagtgacggaatcgggactaagaatatgagtagctgccatttaagggctttccatatgccaggaactgccagcaaacactatgagataggtactgtcaatcatccgtggtgagcttgagcccatgcacttcatgggctacgccactgatcctttagtgtttgttctaagcttccagtcatgtgaaaaactgcccattaaacttggttggaatgatataaaatactgagtatagtactttttttagatggctccggagtcacagagacctgggttgaaattccagcccttgtacttgtttaagtttgtcaccttgaacaagctacctaacctctccaagctttggctttctcatctataaattggggatgacaggtaatggggttttgaaatttctagatagcacttttgagcttttgtgcaagaaggcaagcagaaaagagttcagttctatgtggcaagtaacataaacagggtctgtgaccttcccagagaccaagaaggccatcatgacgtctgctgttcaactacataggttcccaagtcccttggtacaaatcaggaggggacaggtagaaggactgagagaggtaggcttgtgatttgttacctgagatgatgatgtgagagtggacacacatgcagctgctccagatatggctggagaagtgcaggaacagtggggtcctggtcagcaggccggccattatgcccctgaccagctggatgcgtcctcctcacgtctcctgttgtaactgacttgcactgagttgcaaattgcaaatgggtgttgaccctggaagggactcttgaaagtcaccactctcacgactttctagtccttagagagtgggtgggctccatgcagcacagactgggagagtgccatgactgtgggcacttgatgtgcaagggctgcctgccttccagacatgccattgtccttcgcacattattgcctccaggagtgggagcagtggccaaatacacatcaggtgtatttctggacccacaggctgcagcaagagcaccggatacctaggagttgcatcctggcttggaaagcaggactcggccggttagtggatgagtccaggtcattgctcagctcagtgaagagagtgtcccttcagtctagccccaggtctacttcagctatgcagggattggttgcatgagggctgggacacaggaatgggggatggggatggggatttgaaggaagacttccctactgattgcttctacagtaggactatggacttttcctctgtaaaagacaagtacttttggctgggcatggtggctcatgcctgtaatctctgcactttgggaggccaaggtgggtggatcacttaagctcagaagttggagaccatcctgggcaacatggtgggattctgtgtctacaaaaattagccaggtgtggtggcgtgtgcctgtagtcccagctacttggaaggctgaggtgggaggattgcttgtgcttcagaggcggaggttgcagtgagccgagatcacaccactgcactccagcctgggcgacagggtgaaactgcatctccagaaacaaaaaaatagacgaatatttttaagagtcctgctttagtaagaaaggagtggatgctgggtgtaggggaagtcaggggaagaaaaaaacctccatcaaccctacgcaccctgatggtgttaaggactagtgttcaaatccaacgcacaggaaagggtgaggctttaaaaccaaacaatggaacaaatagcaaattaggtatttactcaccatataacaaaggtgttgcacaattgttttgttaagtggtgaatcaaaattcagcttggccgtgccttgtgctgtgggcccccaggcccatgcccctgcctccagcaggtctctaatccagcagctgggctgggtttttctgatctctgttccagtagcactgagggaacgtgtcctttggcccgtcacactctgttacccctggcttgtctcctgtctcattagactgcgttcttgaggacagggattgacactagatcctcagtgctcaacacctgcctgcctcgattgggtccacaatgaagatttgaaagaagagtgggaaatcagagaggcaagcaggtgtgtgcattttcctctttagctttctcctgtgagctctactctcatttgtacacctgcatattccaaacctctttttgaaggttttactgccacctcaaaatccgtttcgaagctcacccctcactcttgcttcttgtcttgtgtttcctgtttccttgtatctgaatatccctctccctgtcatcctcagcccatgtcgcccactgctcggctctcccatgatctccttccctcttctgcaaccctcattgcttctgccgtgctactgatttgtcttcatctggtctctagtcctcctaaacatttattgaagttgcttaacctaaagaatatccacgtgactgctgtgttgcaggtcctgtgttggaggaggtgggcccagatctctgacctataccaatctcttctggcatcagtttcttccatcctgttggattcttcacttcgaactcattactcttatacaggcaatgtggggaagattgaaactgattccttggttggcattcagggccttctgtgatcttgctcattcatccgtcttttccagtcatgtcccgtggctccctttcatgcatgctgtacgttccagccagactggtacataccccgtcatgccctacctcttcctctgttatcatgtggcttcctgcgggaatgccttctcctcccttcacttctcccatgcccttgtccaaattttgtccttgtgcttcagctcaaatgccatctcctccaggaagccttccctgctcttatctggtaagcatttgagtacctatagtgcccatagtccaccactggaggagacaccttgtttttgttttgttttgttttgttttgttttttgagatggagtcttgctctgttgcccaggctggagtgcagtggtgcgatctcggttcactgcaaccttcacctcccagggtcaagtgattcttgtacctcagccttcctagtagctgggatgacaggtgcatgccaccatgttcatctaattttttgtatttttagtagagatggggttttaccgtgttggccgggctgctctcaaactcctgacctcaggtaatccacccacctcggcctcccaaagcactgggattacaggcatgagccatcatgcccggcccccttagtttaattgcttaggctgtatatatcattttgcctctctgcatcctgtgtcctctccttgaggtaagttgggtctatgtcaaattcctcatagccatctttctgcctagtgcagtgtgcagcccacagcgtgctctgaggaggtgctggctgcataatagcacctgtttcctgccttgccctccctgtgctaagccctttccatgctttgtttcacttaatcctcacagcagccctttgacccagatgctattaattttgtcttcctgaggaggaaactgaggctcagagagattaagccacttgcccagggtcacacagctggtaggtggtagagctgggttctatgcccagaacttttgcctttaattcctgttgtatgacccgaatgagtgggatgaatagaactgtcaaaataggatgtgtaaagccagtggaggatgtaaacttcagaggatgccacaaattcagaaagaacgcttctcattttttaaatcactgtgttcagtgggtttcagccatgccctttaccaagaatagcccacagcttagaccatcattaaaaggggtggggtgggaaaggcagcaggagagtaactggtcttctcaaccccctcacagcaatgacttcccaggaactggtgtttcagggtctcacatcctagtagaccaggccctggagtgttggagaaagacagccaaattgcctttttgcctcttcattccttctttaatcccccaaatccttaaggagtcatgactgtcatatactgtcctaagtcctctgggaccacagaaatgactcaatcccattcaagagcctttgctgcaggagaaggagtgaaacccataaatgaataatcctaactttcagaaaaagagttaatgtgattctgagagacaggcttttactgtggaaatggggaggaaggagaaacccttatatctccagactacagaagagcccccaagcctcggcttccttagttaacacccccaacttctgactcagtttgtcaggacctgtttctaagcctggaggtttggacacccccactgccctgccaggagtttgctgaggaccttggttttaagcctgcaaaaggtgtgattagaggcattgtggcaggagcagcctgtctttaaaagagcgaggaaagctaggcggtgtctccctgtgttgaactgtctggacggctccagctctggactggtaaagtgaataaacgagcagatactaagggatcctttgtaccttgcactttatgtaacatagtcatttagttctcgatacaaccctattttgcagctaaggaaacagacatttgaaacagctgtaatttgcccaggaatgcatggctaaaaggtagctcttaattgtagtctgatgctaggtgtggaaaatcacttgggaggcatgaatggagccatgttgttggggagaagaaaggcctgttctgagcttaagggcagaatccttaggaaatatttccctgttctttgctgtgggcttgcactatggacggataccaaagaactgcagagagaaccttttactgaggagaggccagtgcagtggaagtcatttggttagaacctgcccaacagacagctgatcaggcctggctggtagaaagaacagaatgttaacaaatatggtatgcagtgttagggaggcagaagaagggagaatccatgggcctgcttcgattgctttcgagtcatgagttggtggtgaatgggacaggccttaaaaaagtcagagattatgattcaaaaccagacaataatttaaaaaatagatttcgagaatgctaccctccagaagggccctcagagagaatctgaggttttatttacttgtttaacggacagcaaactgaagcctggtggggaaagcaacaagccaaagatgacagtgtgttacccacagaaccagacagcttgctgatctgaataagcctgtaagacaggagtttagtggaggaatagaaggtgaatggagcaggttcataagagagcaaggcagtggattgatctgtatttttgagaaacctcccagcatggagttgggagtgttagctaggccaagtcaagatttctaggacacggggcccaagtgtctttggagatgcaaaagagtccatggtgaggggggcaccaacactgcagaagggggagggaaggataactgttggatagggatcatttcccagttctgagtggagtccagagtccagagagcgtgctgtaaggtggtgtcctataagcttatcatgtgctcttccctgtttcacctgtaggtgattgcagtggtcatggacgtgttcacagacatcgacatcttcagagacctgcaagaaatatgcaggaaacagggagttgctgtgtatatccttctggaccaggctctcctctctcaatttctggatatgtgcatggatctgaaagttcatcctgaacaggaaaaggtttgtggtacactatatccagtttcaccatagtcaacaaatatgaccaagcatccattatctacaagctggctggtggcggtatccctgtttacaaggaagggactgaggctgtgagcaaagtcatttgcctggtcttacagaaaacaaacagtacctgtgacctggcaattctcctaggtgtctacccaagagaaatgaaaatatgggcccccacaaaaatttatgtgtgagttttatagaagcattattcataaagccaaagagtggaaacaatccaatgccaatcaactgataagtggataaatgatatgttgtctattcatacaatagcatactattcacctataaaaaggaatgaagtgctgatacatgctacagcatggatgaacctgcaaacgtgctaagtgaaggaaaccggtcacaaaagaccacatatgatatgattccattaagtcagaatagggaaatctatagagacattgattagtggttgcctagggctggggagttgggggaaggacgggattattgctaaagggtactttattttagcactttctttttaaactgatgagaatgtcctaaaattgactaacggtgatgatggttgcatatatctgtggatatactaaaaactacagaatttgtgttaattgtatgatctgtgaattagatctcagttaagctctttaaaagaaatgttaggattcaagaccttggcctctcccctgtactgtcctgcctcttaatagagcctggaccagctcccttgttgaaggcctgaaggccaccctggaagttgctgcttttgacagtagctccaggaggctgcccttttaatcacagcaaccagtattttttgagcccccactctgtctttggcactgctccatgctttttttttttttttcctgagatagagtctcactctgttgcccaggctggagtacagtggcccaatctaggctcactgcaacatccctctcccaggttcaagagattatcctgcctcagcctcccagttagctgggattacaggtgcgtaccaccacacctggctaatttttgtatttttagtacagatggggttttgccatgttgtccaggctggtcttgaactcctacctcagatgatctgcctgcctcggcctcccaaagtgctgggattacaggcatgaggccccatgcccagcctgctctgtgcttttaacaaatgttatgtaactgaatcctcaaagcagcccctatcaggtaagtggcacctgtgttttagaccaggaaatagtgacacagagaatccaagtgtccaccacttcaaagtagtgggcctagggtctgcctccttgtatgtctgcctccaaccccagtgtctgtaatcactattacatgctgctgctgttcatttctcattattgtaaaattagattttatgtctatttctctgattctgaaaatgacctaagtgtttcagtggaagcctatacaacatagctagcttggtcactttcatggaaagaagaaagaaaaattgtcatatttattacagaatttgtttttttgttgttgttgtgtttttttgagatggaattttgctcttgttgcccaggctggagtgcagtggcacgatctcagctcactgcaacttctgcctcccgggttcaagcgattcttctgcctcagcctcctgagtagctgggattacaggtgcccaccaccacacccgactaattttttgtatttttaatagagacagggtttcaccatgttggtcaggctggtctcaaactcctgacctcaactgatccacccgcctcggcctcccaaattgctgggattacaggcataagccaccatatccggcccagaatttgttttttaaaaattaagcaacccatggcttctcagccttttggctaagatcaagtgtaaaaattaagcatcttaacctgtgagcttcagaactttatttgttcatcacctgtatgagtatctattatgcactgggtactagatataaagcagtcagcaaaacgaatttagtctttggtactataagttactgcctaagagactctaacttaccaccttattattaccaagcaatttggtttacagaattcagattctcccacagagttcttgttggttgcctcatgataaagacaggattggggtttctagaccaattgagatgagacagccatgtaacccaacaggtggttagaaaatgagtccaggtggacccaaggaagatacactttggcatggaaaagagcattatcagctagccaggtaaagaaatggaaggtatcagtgtttaatttcaaggtactctttctataattaaggctatgcattagcagagaaatcacagaattgttctggccacaactttggtcaagtgattttctctatttatctactagacagaaatctatgagcaggcaccggttcagttgcctactgttggttgttgccttcataggtgtccagatcctctgcaggggggtttaagaaggcctatttctggccgggcgcggtggcttacgcctgtaatcccagcactttgggaggccgaggcgggtggatcacgaggtcaggagatcgagaccaccctggctaacacggtgaaaccgcgtctctactaaaaatataaaaaattagccaggcctggtggcacacgcctgtagtcccagctacttgggaggctgaggaaggagaatcgcttgaacccgggaggcagaggttgcagtgagccgagatcgcgccactgcactccagcctgggcaacagagagagactctgtctcaaaaaaaaaaaaaaaggcctatttctctggcctccccagtttttgtagttttacctccttcctggggaagcactgtcttccctggttgcttgtgtctcctgttcctctctgtgctagtgaatttgtgccccttgctgtatgggggctgatgtccccatgctctgcctctgtagctggttcagaatgttgggttgtgctgtctgtaggaacttggtcacacattgatgtgcaggcgctcacaagtgctttggccacgatcacagaggcatatgcaacattcagatgtgtgtcaaagggaaagatacagaaaaccacacctaatctgcccataatggtattcttatgcttattatatgttgatcctttaagacttggctcaggggtcatcacctcctccaggaagctctcctcccaccaagtccaggtgtacctctatgacattccctagtcgtttttctttttttaatttttattttgaaataatttaagatttataaagaagttacaaaaataatataagaaattcctgaatactcttcacccaagttctccacatgttaacatcttacaaacctcagtacaaataacaaaatcaggaaataaacttgatatcaatactatctaatttacagacttatacatttcccggtcgttccactaatgcccttttttatggtccaggatccaatccagtccaggatcacaccttacatttagttgtcaagtctccttcatgtgatttaatctggaacagtttctccatctttctttgtcttttagggtcttgacctgcccccaccccccccccaccaccccaccccccgtttttttttttaagagataaggtctcgctatgttgcctaggctggtcttgaactcctggactcaattgatcctcttgcatcaaccagcctcccaagtagctggaacgacagacatttggcactgcgcccggctggatcttgacacctttaaagaatactagctagctgggtgcagtggctcacgcctgtaatcccagcactttgggaggttgaggtgggcagatcacctgaggtcaggagtttgagaccagcttggccaatatggcgaaaccccgtctctactaaaaatacaaaacaattaaccaggcatgatggcaggtgcctgtagtcttagctactcgggaggctgaggcaggagaattgcttgaacctgggagatggaggttgcagtgagccgagattgtgctactgcactccagagtgagactccacctcaaaaaaaaaaaaaaaaaaaaaaacaattttttgtagaatttgggtttgtctgatgttttatcaaagttaaattcagattacgcatttggtaagaagaccacagaagtagcattatgtcttgccatagttttgtgttttatttttagcttattttgaatattgatagattaacagaagttgcaaagattgtacagaaaagtttcatgtacccttcacccagtttccccaaatgttacatcttatgtaacttatggtacaatgtcaaaacctggaaattgacattgtatacagctttgtgccatgttatcgtcatgcatgcatatccagacagaagtttccatcaccacaaagatctccctcctcctgctcctttatatagtcacatcactcccctcactttaacccctagcaaccactaatttgttctctatttctataattttgtcgtttacagtctattttgtaaatggaattatacagtatgtgacctttcaagatttgctttttttctctcatcacagtgcttttgaaatccatccaagatgtgcacgtatcaacagtttgttccttttcattgctgagtattgtatggtatcttataccattcagccactgaaggacatttggatatttccagtttttgtctgttatgaataaagttgctgtgaacatgtgtagaggttttgtgtggatataggttttcatttctctggatgctgttatgtgttactgtagtttctaaatcaattagttttctctctcttattctagtccttgaaggtaaggagcatgccttacatctctgttgtctcacggcttggcacatagtaggggctctctatgtttatggaatcaatgagtcaaacaaaaatcttacacgtttaatttaaatgtgtaagatttctaacgatatagagccactggtctgctccagagaatgcagattgttgtagtattttgtatgccattgtttatacatttatgtgtgtcattttacaggaataattatgcatacatgtgcagtatattgccccagcataccactaccagtgtacgtttttggtaattatgtatttgtaggagatgtgacattgcttgttaagccacatgtgatatgagtgtttctgcctcagcaggcctgtactagagaaggcctgtcctgtgttcctattctccatacccattatggtgttgagggtgagtgaggatggactgttactctaatgtgatgccattaaacaaacaagttggaggaagatcagcttaccttctttcagactttgctaaaatgttctttattactagcatgttttctttgatgattttatcccacacattttgcttcagaatcatttcttggattctgttgtttagtatcccaaaaaggttgagtgttcttttagaacacatacacgcatgaactaagggtctcaaaagtaaatataagaaaagaacagatgagaagatggaccaaatgtagaagtaacatcacttgaggcttgagaactgtctggctagtgtaccatgtatactgtcactaaatggtgaccctaagccacgcatatgccaataattatatctgggaattgtaaactaaggctttttgtcctaaccatttgctcagcagatgagtattgctgaattgttcatttatatttctcccactccctgccaacagttaatgacagttcggactatcacaggaaatatctactatgcaaggtcaggaactaagattattgggaaggttcacgaaaagttcacgttgattgatggcatccgcgtggcaacaggctcctacaggtaagtctctaacccgtccaaggcttattaatctaaactcttcagaagaagcatgtcatgtaaaggtaaaagccttttcctctcaatgggagcctgtatggccatgcattctgatatgcgtgcatctgtgtatagcagctggttatcaaagcctcctgttagaggcagtttgggtgggggtcacttcccctgtcctgtagtccatagattaaaatgcagaagttgaacttgtattgagacaacacagtcagcaagtcctagatttcaagccttggcccaggtctgcaggggacgaactgggggttaacagcaacacacagtctggaatcctggttccttagggatctggacccagcttgccctgctcacttgaaggtaggggcagttgcaggcatctccattagtgttgaaggcagagccagagctgtcagctttagactcaaatcctccacgttgcttcaagccttgtaatttagagctttagtctagaaaatactgattatgtttctgacccacctttgaagtgtcacattggcaatggcatcttaaggtagagagcaggaaggttgaagagagggtggggataatgagcggtttacatgaatctctagaatttgtgccatttgtacatatgtggctccaatggttgtatgttctgccgcctctgcggtagattgtctgatggtttgcatgaggtgtgtctgtagaattttaaaaagaaaaccccatttttgaagaaacacacaaccctgagtgataattacgtgtcagccctgggtaaaggtagaaatgtgaaggcttgtggaaaatgaggcagtaagatcaagaaaatcttgacacctttctttttcaacagtaccctcattgctcagaacaaaatttgaactttcttcaccaaagaggctgtgggaaaaaacaaattgaactctttttcttggaatttccttttgtaagaagtttattaaaaaaatttgtttttaacctaagtaggatttatctatattaaccaaacttagctacaaatggacttttgctgttctaaaatataaaaactaccctctccaaatgaaattgatgacgatgatagcttccatttgttgaggaggttttataatcttggtgttggataggtgctttatttacattatctcattgaaggctttcttttttttttttttcgtgatggagtcttgctctgttgctcaggctggagtgcagtggcgccatcttagctcatttcaacttctgcctctcagattcaagcgattcctgtgcctcagcctcccgagtagctgggactacaggcatgccaccatgactggctaatttttgtatttttagtagagatggtgtttcgccacgttggccaggatggtctcagactcctgacctcaggtgatccgctggcctcggcctaccaaagtgctggggttacaggtgtgagccactgcgcccggcccagcctcattgaaggctttcaaaagaatcttccttctcaggctttgaaggcagttttcagggggactttgcattagccatatcttggttacaggagacagagttgactgtgttctatgatctctgtttgaaacctacttctggtacaaataccaccattagtggggtgatggcaagtgtcagctaactctcaaacgtactgactcgaagaacccggaaggaagcatagaaaggtacagttggttttcagttcatcttgacgtaggagccacacgctgatcagaacactatatcctggttctgatgttttcgagttgacttttgttcttaggcaggctctccctttgaagtcaacgatcctggctttgtttattttttgtttttgagacaaagagtcttgcccaggccggaatgcagtggacgatctcggctcactgccaagttccgcctcctgcgtttacgtcattctcctgcctcagcctcccgagtagctgggactacaggcgcccgccaccacgcccagctaacttttttttgtatttttagtagagatggggtttcactatgttagccgggatggtctcaatctcctgaccttgtgatccggccaccttggcctcccaaagtgctgggatgataggcatgagccaccgtgcccagccagatcctggctttcttatatggcctttagtagctgtctcccaaagggtgaaactctttcactcagaattactatcaatcccttctgtcagaatccatttgataaagaaaaaagaaatctctgaaaacttacttggctctggtgggatcacatgcccaccctgaatgaatccctgcatccaagggaataggatactctggccagtgtggaccacatgcctgcccctattgtggttggagagagtatgataatgaaagctttctggggtacaggtgggtgtgagttctgctagcagaggagggaggcggggaagggacaccgtacaggcaagggcacatggccactaatcagctctaaaatgttttgagccatggtgttttgtgaaaatggcagcacagccccatgactgtgggtcctccactgttagtgaggaagactacttcagcagccacaaggacaagcttgagggcaggaaggccactgatgttgccactcaaacagtagcaaggagcagggcattagcaattcatagggcctagggtctgatctggagtccagcagtagctcccctctgtgataatccctttatctggtttccttacctttaagatgggggtgctggcctaaatagttttcttacctttaaaatggggatgctggcctaaatatttagaagccctattttttatttttaattaattttttgagatggagtctcgcccagtcatggaatctcgcccagtcatggaatgtgcagtggtgtgacctcagcttaccgcaacctctgcctccggggttcaaacaatcctcccacctcagcctcccgagtagctaggattacagtcatgcaccaccacgcctggctaattttttatgtgtttttactggagacagggtttcaccatgttggccaggttggtcttgaactcctgacctcaaaggatctgcccacttcatcctctcaaagtgctgggattacagtcatgagccaccgcgcctggccccctttccagtttttaaaaactctgaggcaaggaccaggtgaggtggctcacacctgtaatcctagcactttggaaggatgaggtgggaggactgcctgagccgaggagttcaagaccagcctgagcaacatagcaagaccccgtctcaaaacaaacaaacaaacaaaaaaaccctctgaggctgagcatttagtgtgtttgttaaacagttggcctttttacttttatggtaacacacataaatgttatatatgtgttaaggctagttaaatacatgcaaatggtaggtatgatatcaccaaatttgtgacccttatgtggtaagatacctgtactatattattcagatggacagtgagtaaaacaaaattgctcatccttaccagctgctgtttgtttctttttaatctttaagttttacatggacggatggcaaattaaacagcagtaacttggtaattctgtctggccaagtggttgaacactttgatctggagttccgaatcctgtatgcccagtccaagcccatcagccccaaactcctgtctcacttccagagcagcaacaagtttgatcacctcaccaaccgaaaaccacagtccaaggagctcaccctgggcaacctgctgcggatgcggctggctaggctgtcaagtactcccaggaaggcggacctggacccagagatgcccgcagagggcaaggcagagcgcaagccccatgactgtgagtcctctactgttagtgaggaagactacttcagcagccacagggacgagctccagagcagaaaggccattgacgctgccactcaaacagagccaggagaggagatgccagggctgagtgtgagtgaggtgggaacacaaaccagcatcaccacagcatgtgctggtacccagactgcagtcatcaccaggatagcaagctctcaaaccacgatttggtccagatcgaccactactcagactgacatggatgagaacattctctttcctcgaggaactcaatctacagaagggtcaccagtctcaaaaatgtctgtatcgagatcttccagtttgaagtcttcctcctctgtgtcttcccaaggctctgtggcaagctccactggttctcccgcttccatcagaaccactgacttccacaatcctggctatcccaagtacctgggcaccccccacctggaactgtacttgagtgactcacttagaaacttgaacaaagagcggcaattccacttcgctggtatcaggtcccggctcaaccacatgctggctatgctgtcaaggagaacactctttactgaaaaccaccttggccttcattctggcaatttcagcagagttaatttgcttgctgttagagatgtagcactttatccttcctatcagtaactgctccgtgttcagactcctggtttcttccaggcttacagtggacatcatcagcttcctgctttaaaaaatatcttatgtccctaattgcctttcttttacctgactttgtcacctttgttgtctttgaattctttaggctgcatattattttacatgctttgttttgtcatgtatataccaggtattggttttatggtttaaacactatggatacaggggtttgttttgcacaattttaatagtcatgcactacataatgatgttttggtcaatgacagaccacgtatatgttggcagtctcataagattataatactgtatttttactataccttttctgtgtttagatacaaataccattatgttacagttgcctacagtattcagtgcagtaacatgatgtacaggtttgtagcctgttttgcatttttcttaggttgtatgctcttctgttttaaaggtttgaatcaccagcatttttgtgatcaaaatcctatttagaaaaaataaaactactttctgtttatctctttagaatatctgtgttcttagcattaaataaatataaacttgtgcttctgtactttttccccccctctgacacttttctctttaaatctgggagtatgtcacaaattaatgcacctaatagatataggtatatagatatctatatctgaaggttttttaaatagtgtcagggtgaggaagaagtagatgatccaaactatagaagagaaaatagatccacttaaccttcctcagcatcatgaatattgatgttactctatagtttaagtgaggaaactggccagaaatagcaggcctttgcacatgctctgccttttctcttttcgaagaaaaagcctgagctatttcagtaggtccttggtactctggtactctgcttgtctaccaaaggaggcgttagtgtatgttcctatattcattcccaatattaactctggtggccccatgggcctcatttcatcagctgggtgtattgacagtgatttagccatctaatatcccagagtaggggcaaaagaggacactgacaattatcccagtttcctggtccagtggcaggcagtgtaatggtttctacatccttctaatcaggattggtatggctgtggaatcctgtttttgtctcattctcatggacagacaaaagggaagagagttaaatgatgccttcctccctctcctgacttagctacagcaaaaaagatctataacaggggaaggtgtctgccacataaaatgctgatgcacttgtatcatgagtgtccctacactcacgcgtgtgccaggacttccttatgatggtcaggctatttgctgggttagtgctgtaatctgtggctataaagaaaaggaaaggaaggaaattgatccatgtctgcttagaaacaactctgagctaagcctcgagtaaacatattgttatttgaaatcatcttacagacttaagtcacttcatatatgccatctttgatctttgcagcaatgtagcagagagctatgcaggttaggtagctgttatttccaattttcagatgaaactgaggcactgattaagtagcatattcaagatgacatggcttgtaaatggtgatgcaagaatttaaacacaggtttctagattctaagtgcagtactctgttacatgactatttctctacacggagtatggaagcaggagagagtgtaccttgagaaatggcagttactgcaatggtgaatggaaaactaaaacagcctcattaacaaacgttaagtacaggctgggcgcggtggttcacgcctgtaatcccagcactttgggaggctgaggtgggcggatcacctgaggtcagcagtttgagaccagcctcaacatggagaaaccctgtctctattaaaaatacaaaattagctgggtgtggtggtgcatgcccctaatcctagctactcgggaggctgaggcaggagaattgcttgaacctgggaggcggaggttgtggtgagccgagatcacgctattgcactccagcctgggcaacaagagccaaactctgtctcaaaaaaaacaaaacaaaaacaaaacagcaaaaaaagcaaagtacaacaaaaaaaagtaagtacaaagtcctaatctgtgatacttctttttgtttgtttttgaagcagtctcgttctattgctcaggctggagtgcagtggcacaatcacagctcactatttttttgtaaaggcagggtctcactatggtgcctaggctgctcttaaactcctgggctcaagtgatcctcttgcctcagcccctcaaagtgccgggattacaggcatgagctactgcattcagcctgtgataatgtattttaatttagtttgaaattttaactgaatgttctatggaactgttaataggatgacataacaaaggttctgtgtttagtgtgagaaactgggccaaagaaatgtaaacaaagttctttaatgcaggactactcagaactctgaagtaatgatcacagtgaatttctcagagcagggcaggtatatggcttaccacaaactacctaccacagagtgctctttttgtggagcaggactcaaaaccattattctctgaaagtgtggccaacaattagaaataagagcaagagccgggcgcggtggctcacgcctgtaatcccagcactttgggaggccgaggcgggcggatcacgaggtcaggagatcgagaccatcctggctaacacggtgaaaccccgtctctactaaaaaaatacaaaaaattagccgggcgtggtggtgggcgcctgtagtcccagctactcgggaggctgaggcaggagaatggcatgaacccaagaggcggagcttgcagtgagccgggatagcgccactgcagtccagcttgggcgaaagagtgagactccgtctcaaaaaaaaaaaaaaaaaaaaaaaaaaagaagaagaagaaaaaaggccgggcgcggtggctcacgcctgtaatcccagcactttgggaggccgaggcgggcggatcacgaggtcaggagatcgagaccatcccggctaaaacggtgaaaccccgtctctactaaaaatacaaaaaattagccgggcgtagtggcgggcgcctgtagtcccagctacttgggaggctgaggcaggagaatggcgtgaacccgggaggcggagcttgcagtgagccgagatcccgccactgcactccagcctgggcgacagagcgagactccgtctcaaaaaaaaaaaaaaaagacaaaaaaaaaagaaataagagcaagagatacatggagtcctaagaaaatgacccagtctctcaaagtaagcagtctttctggagttgagtccagaaagtatcatttatatggcagagtttttcaaagtgagatctgaggaccacctgcatcagtcttggggtgcttgggtgcttccatttaaaatgctgattactggtttcactcccaggggagcggggtatgagtgtggcagcctatgtagttcaaaaatatttgttattcctccctgggagaaaattatatccctctgtctactgtcagatttggccatcgcagacttagctgtgaatatttcagcatatatatctaaaagataactgttttagaaaacataatcatggccaggcgcggtggctcatgcctataatcccagcactttgggaggccaaggcgggtggatcacgaggtcaggagtttgacaccagcctggccaacatagtgaaaccccgtctctactaaaaatacaaaaattagccgggcatggtggtgtgcgcctgtagtcccagctattcgggaggctgaggcaggagaatggcgtgaacccgggaggtggaggttgtggtgagccaagattgcgccactgcactccatcctgggtgacagtgagactctgtttcaaaacaacaacaaaaaagaaaaccactttaccactgtcacacctaaacaactttgatacaaacttatcaaataaatattcagtgtttaaattcagttgtctaatttttttctccccctgatggtttgtttgaattagaggttgatccatgcaggcttgacattctcctattaaaggaatcaactgaagaggtggccggccaccccacctctgtaggcagttgggctggggagtatctgtcgtttacttatgggacttaaagcgactaacaagaaaagctagggtacaaggtcgtgtaaatgaaaagttacatgaaggaaacccaagggtgagggataaaaagtggagtctggaatgaggcttgaagagcccgccatgacatacacacctacttcatgaggccacacgtttaagctttccaatagtgaatacagagaagcctggtcagatacaccattcgcagtgtccttaagattaaagtaaatccagatacagaaaggacagttattccccacggtggcatatgcctgttgtcctaggtatttggagggctgaggcgggagggtggcttgagccagaaaggacgaggctgtagtaagctgtgattgcaccactgccctccagcctgggtgatagagtgagaccctatctcaaaaacaacaaaattattccaggcactaagataatttctttcaaggatctttttataaaaacgatacttataaaaatgacattctggtaatcacattccgataataaacaatgacagatactctggggcatgcccggaccctgaactctgcagaggcagttgtctgaagcagtaaatgaggtgaatgtattcaggtgtattctgtgagcatggaatacataccttatgttgaatatgtttagatctacattgttaggctaagtttacacacacacctagatgtatgccccagtttgcctggcagagttccagttgatgcctcttatccccaagtcccatctggttaacacctccttttattctcaaaagtgtcccagtttgaactataaagtatataggcatcctatatagaaagcacctcgcagacctaaggaggctgtccccagttcacccaacttcattgaattgtgtgtccctcaggccaaagaaacagaggctcctctggctgcggaatcctttccagtggatctttccacaactgtacccaaatctttgaagctgcgtcagcacttttgcttatgctaataactgtgtgaacgtgatcatttgtgtgcaaaccaacaaaccagacaggtttacatatgttacagcaagttgtggaagactgcaccttagactcttgggaaaatcctgatataatgcaatttagtacagcaattctgtaaaggaccaccacttttcagtctggggatggctgcctgttgtctagcttgatggtggcaaccaaagggcagttagcgtttctcttaggaagctaacagttgtagcgggttgatacatggatggttgtaatggacatctattatttttgcttcattcattcaatcattcatcctctggtaatctcacgctcagatttccctctgaggaaccgttctgttcccagctttcagtccatgtgtttctgctgaagctgacctaacccgaccctggatgtggaacatgggaccaaggcctaagtccattagtacattagattcctgggcttagtggttgatttagggatggatacatggcctgtcaggaatacgttgccaaggaattttggaaagaggtttaatgcttaagaggatgtggtggctaaaactggcatggccactttgttaccacgttacgcctgaatcagcagaacgtggatcaatatgatcagaaagaatcctggttatgtggtatgtatcctgatgcagctgtgtctcaagtcagaactactcttggacttttcattttatttttatttatttattttttttggaggcagagtttcactcttgtcacccaggctggagagcaatggtgtgatctcagcttactgcaacttctgactcccaggttcaagcgattctccagcctcagcctcctgagtagctgggattacaggtgtgcaccaccatgcctggcaaatttttttggtattattagtagagacgggctttcaccatgttggccaggatggtctcaaactcctgacctcaggtgatccacccccctcagcctcccaaagtgctgggattataggtgtgagccactgtgcccagccagactttttagtttatatgagccatttctgcttaagagaggttgggttgggttttctatcacttatatccataaaagtcttaactggtacaaaaatgaaaaccctaaattctatgccttcctgaacatggtcaataggtttagtctggaaattcaaagcaaaaaataccctttatcataggcacagaaaaacttccatattgtaacacgattttgaggaacattatctttctggaaagcttatcatttggaagttgcaaaatacacctttatgtaacaaaatgattagacttttatggaattgttggcaatcaactaaataaattctggatgccatctcaagaaatatcagttttaatttcagagcagttattttagcccattctttctgaaaatagttaattaggaagactaagaatctgttgagaccattcctagtttgtggaaataaaaccacaacatcaacatgcaggttattacttaggtattttctctaacagtagtctgtgtaggcaaaataaccccttggggagagttggactttgagaactttctaaggcagatgaactaattttcttccaggagagtgtagctctaatgattttaagtggcccatgtagttgagcaaacactggcctgggaattagaaagcccgagttctagttttagttctgatactaaattaactcattgattctgaccaagtccttttaacttctatgtacctcagtttcctataagacaagaaattcaggctaggtgttaagtatggtctcctccagctttaagattatgatccatgagaccagcctgaccaacatggggaaactgtctctactaaaaatacaaaaattagccgggcatggtggcgtgtgcctgtagtcccagctactagggaggctgaggcaggagaatcgcttgagcccggtgggtggaggttgcagtgagatgagatctcgccattgcttgccagcctgggcgacagagcaagactccatctaaaaaagaaaaaagattatgatccaataatacaggcatggccgatttactgtctcttcataaacaggaaggtttcattatatgagtaatagataaaatagataagttattttatttatttttttttctattttttgagatagagtctcactctgtcgcccaggctggagtgcagtggcggatctctgctcattgcaacctctgccttccgggttcaagggattctcctgcctcaccttcccaactggctgggattacaggtgactactaccacacccggctaatttttttgtatttttagtagagacagaatttcgccatgttggccaggctggtctcgaactcttacctcagttgatctgcctgcctcagtctcccaaagtgctgggattacaggtgtgagccaccgtgccaggccatgaaataatcttaaaagtggcatttatttcattttgccttatattcatgtataaaccttggtttccgtatttgggctgttagtaaaataagacaaaaataaaacaaggaaaaatcaatgtcatgaagaactaaaactaagcctaaagcatgatgtttatctgtatattactcaataggcactgctactgggctacgaatgtgaatgtgccatggtcctcgtcctcagtaagttccctgtgtaatagtggcggcaggtaaaccacagatcaactaaaactaagcctaaagcatgatgtttatctatacattactcaataggcactgttattgggctacgaatgtgaatgtgaatgtgaatgctgacatggtccttgtcttcagtaagttccctgtgtaatagtggcggcaggtaaactacagatcaactaaaactaagcctaaagcatgatgtttatctacactcaataggcacttgttactgggctacgaatgtgaatgtgacatggtcctcgtcctcagtaagttccctgtgtaatagtggcggcaggtaaactacagatcaactaaaactaagcctaaagcatgatgtttatctacactcaataggcacttgttactgggccacgaatgtgaatgtgacatggtcctcgtcctcagtaagttccctgtgtaatagtggcggcaggtaaactacaggcaactaaactacaggtcacttttctcacaaaagtgagaatacagttcctagactacaagggggaatgtttaagttggatagataatttagagctagccctttaagggataaagataatttaaaggatggatggagaattctaggccgagggactaacagatattgagtccctacattaattactataaaaataaatcaaagaagattcttacatgaacctatgcaggtaaattcagatttttttccccctggtggatttgctctgagttgaggtaatgagagctaacattgattcagtgcctgctatgttttgcactgttaggtactttacatgttatctcatgtaatacctctttaaacctcattttacaactaaaattaaatgacagctaggagctaggaaatggcaaagttacgattccaagtctggactggttgtccacaaaagcccctgctcttgccataatgatgccacttctttcaaagaattcagaattttcttcacagctttaaaaatgcatagattctgaagcctctcacttccttccaattagttgcctacctagaaagttatttcctccacttgagctcatcaccccttcttagcgctcctttggattactgtaatttctttttctttgacctcacctttcgtctgatggattagtgtaatctttcccaaatttgttaatctgaagaattcaggagcttctcaaaatgcaggttcccaagccatgctccaggacatcgattcagaattggatcaaggcctagaatctgtgtttttaacaagcatttgactcaagggtatcaaattggaggaagcactgagttggtggactaccttaattgatctacccattttcagtctcttctgccaacccattcgctccaccccacccccagtccgtttttccgttttgccctcaaggtccctgaagacttccatatcatttcgcattgttttatttggggcactgtgccgcactacctgggcccacagcaggcgcgcaatatttactgacaaatacaacccacgaggtagttcctattattacccttcaatttgaaattgagaataaaacagaagtcgacaagttgaggtagcttgtgacatcagtatttcgtatttaatccagaaagcactgcttcaacgcccagtgcgtgcaaggttccactctcgggccagcggtcctctcccaaagcccgttcttcctaagtgtgcggccgccatccaggacacgccacgctcgtaaaaggtcacctgaagcatctaccctccacgctcaagaggtaggcggaggagcgcgcccttttctccaaaatggctgagcagggtcacgtgggctcgggggcggggccggtgcgctcgccggagcctggaagtgggtcacgtggctcagacgggggcggtagctgtgggggcgtggccgtcacacggcgcgatccgtctgggcagcggctcttcgggggccacgccctccgggccctgggggcctagcgcgcgacggtggggtggagctagcctcgtgaccttttaccccaacatggctgcgcccgtgggaccggtgaagttctggcgacccggtaaggcccttggtggaacgctgggcagatgcggcggcctgacttcggtcttggcgccgcggccggcgccctggggccagcagacctgctcgcaggcctgacctcggcgagctgggcgctgccgcctctgtgcggggggagctctggctcaggctccccagtggtcccgagggatttgggggtgctcccctagcgtgagcagaaactctttgtgaccttgttaaagtggtccagcctcctcaggcctcgtcttcctcgttactgatgcttgtcctgcccaccccgcgagatggggaatcctaaagctccctctcgtgtctcgttagcgccctggggttgcgctgtggcccgacagacaatgctgctcgctgctggaggcttgcaagcccaagttatggagtcagactgtccgggttcgaattttcgtctctgccttgtagtagggtgaccttgggcgagtcacttaatgcctctgagccatgacttctttacctgtaaagtgggcagaacaatagcttctatgctgtgggcttaaatgacaagcagaacgcgttgtcagacttagaataaatgctcaaaaaaagggaaagtgtgttattttcttttaggataattgttgtccactccgaatgtctactagaaaagggaacagtccttcatattggctgccagccacttcctctcttacagactaacacgaatcacaatcacaaaatgctttacttgttttgtcttgatatttactcattaatcaggtttttactgaatgtgcatatgccagaccgtactagatgcattacttcctctctgcaaacagtttcttgtaaaaaacaaaagtttttaaattacagctaccagcttgatttttttctaccacctgcacccctgcaggtctggatgtgcaaagtatattgcagcaaaaatgaaatgacaccaagaatgtaatataagcaaagcttttaatttttcagtggttctctgaaattctgaccatgcatataagtgatgtgagagataaacccaagcaagagatatgtttaatgctttttaaaaatttgtagtctgtcacttgacagttttatggttcagcatttcaagtcatcagccaattatccatcctgagttttatttgcatccaaaactaggaacttactaagtaatgaatacttttaatttattcacgcttttagtaacaggtgaaagtgttaggtataataaagagctgaattaattgtttgaaatcagaccagggtactattttggttaaagaacgtggaattactcttaagagttctatttcattatttagttcatccattgagggtacacttattgaaaacctaatcctgtgttcaggagacaaatacagatgctcagggctctgctctcaagttactgtctctctcttaattgaatataaagttagatgtcctctagaagagattttacaatgagacagagtaaggtggtggtaaagaagatgagctctagagtcagactgcagtgcccatcatgtctaccacttactaagttgatgacttgatagtcacttaaattctcaaagtctcagttactccatctgtaaattgggtataatacctaccctacccaaagtagtgttgtgaggtttaaatgagaataacacacaacaggatcttggcactagataggttactattataattatatggaagtatggaagagggagggaaagttgaatgtatggataagaaatacttcattaaggtggtatttttggagtgaacattaaaggatgaataaggttttgtttcatagagaaatggaactcgaagcaaagggtgcagcatgaacaaaggcagaatgggatttgtgcctttagaatgtccagaaagccaaaataacagagcagtgtgatagtgttaagtgctagggtatattttggggtatgacaggagatgaagctagaaaagtaggtaagggcctcattgtgaaaggtcttcatgacaagttaaaaagtttagacttcactgtttttttgttttctttcttttttttttttgagatggagtctggctcagccgcccaggctggagtgcagtggcgcaatctcggctcactggaacttccacctcccaggttcaagcgattctcctgcctcagcctcctgagtagctgggactacaggtgtgtgccaccacacctagctaatttttgtatttttagtagagatggagtttcagcatggtggccaggatgatctcaatcttttgatcccgtgatctgcccacctcggcctcccaaagtgttgggattacaggcgtgagccactgggcctggcctgacttcagtgtttttaagcaggaacaaatcaggtttactttagaaagataacactggcagtggagtagagagtggatggaggaggaaattagagaaggtactagtgaaatccaggagggatgttaaaaaccttaattctgacctgggagcttagaggaggtgcctgttggagagacattttagaggaagatgtgggagaagatgaagtcagtaataactcagatttctgggctgggtgactgtctaggttagtgattctctaattttgctttatagttgaatcacttgggaagctctgaaaagtcctgatgtgcacttgcacctcacaccaataaattagaactttggaggcctaggagccaggcatcagtgttttttaaagtctctaaggaattccagcatgcatcaaaatttgggaaccactggtctaggtaaattgtgttgtcattagttgacatgggaatagctttagtacacagttattgggccgttgctttgtgttagtcactttcatttacacatcttattaaacagtcacagtatctctgtgatgacagtaatactcttattttagtgaggaaattcaagatatgaagtaggttgtgggaaatgcaaggtgaaagtcagggaagctgatataaggctagacattcaaatcatgaacatatcctgtaggcctgagcctgtgattacagaggtctttcagacagtctaagtgagtgaagttgcttactggaggtaatagggagtggtggggactgtggcagagtgtgcatacactggatagtatgtacagtggagatctacagtagagcttacatatgctttctaaaatagggagttgtactcaggtccacctaattgttatcatatgggttcagagttgcccaattttttttttaagaagcctaatatccagatctgaatgggaaaattttatgtgttgttttaaatgaatgatttaaaacattttaacaatagcatgtctgggtaccttaagatacccatttgtggtgtctaccttaggagtgtgacttaagggccttgtatgacctgcctgagagttttctacaaaaatcttttacttaatttgcaagtacacgtggatccgaagggcctgcccattttcgtttgctcatttgataaatatttcatgattgttgaccatgtgcatgacgaaaactttacaataggttttaagctttttttgacttgacccacagtaagatatagcacacatacacaactgaagaaaaagttgttcataaacagtattgctttctggaatgtgctctgatgctttctattctatttcattatttaaaaagtgctggtatgacatactacattgatttcataacccactaatgggtcaccagtaaaatttttaaaaaccaagttaaagggaatgaggaattagggatatcagccttgttaagatagggaaatgaagatgttcatagtttgcaaaagttataaagttgttactcccttaagcatagagcgtacgctcaaggaaaaatcaatcataggcagccacagaggggtgtttatagagggaaagcagccctgatgttctggtttggttgaaggaagtcttttatgaggagaaggtatactgtttatcaactgacatagctgttcttataaaagagctcagctgggcgtggtggctcatgcctataatcctagcacttcgggaggtcgaggtgggtggatcaccagaggtcagaagttcgacaccagcctggctaacatggtgtgaccctgtctctactaaaaatacaaaatgagctgggtgcggtggtgcgtgcctgtaatcccagctactcgggatgcccaggcaggagagtcgcttgaacctggaaggcggaggttgcagtgagctggcatctcgccactgcactccagcctgagcaacagagactccatctccaaaaacaaaagctgataatagaagagatagattggggctgtaggttagagacaagggaggaatacggtagtacaaaagacatgttaaaatattccagagaggatatgaaggtttaaaacatgatttgaaaaggcaggaattcaggacaaaaacacagcagaaaaggataaggtattctttgtcattgttttcttgagtaacaattacaaggaattattaagatgtagtgacaagaagggaaggaaagaaagcctgtctctttgaggacaggcattgttccaggtcctgttccatcttttgtcttgttgaaaggaaggtcaacattttggcaaaagcaacatgacagtgccccacttacctgatttttggccatcttgaacctctgaaacacaactctgttcctggaagtaaatggaaaagggtcagagatctaaagcagtgattctaaacttagctctagggggtctacggacccccccgaattttatattctggtaaattctggtgtgttttttaggagagggagttcatagcctttatcagattgttgaagcaatctgagaaccctaaaaagtgtaaaagtaagtcactgagctgaatattcttgttacaaagctcctgtgctttcacttagcatcacagattctgagttcagaagacctaggagatgatggttattggttattatcactgtagtgccccagcaggaggctgtatagcatgtgtttgatctagggaggatttttattcatttacaaggcagcaaactccagtgctgaaaagtgtgaccttttggaaatatcttccttacattgagttgaattctgaaccctgtgtcatttacttattactcctagttctgtcctagagttacagcagcaaatcagcatgaaaagttatggaagctgctcacaaaatttaaagttatgtttctcctgagttgtttttctgtttgagctaaaactgtatggaaccttcaacaggttttcatgatgggatatggcttccctattcttcaccatcatgatcaccagtttgtcattgttattagcaagaagccggggtgaagatctcttgtttaatctgcccagcatggcggttactgagaatagcatttcccatctatccactcccgattccatggttccaatggggactgtcatttacctcatcccattccactggccatggttgattgtattggggtggggattggacctaagctgggagaagtcagtccctgtctgtccagtataaaagagcctcccccaccccccattacaacacatacctgggactcccagtcccccttacgttgtctttatttctctccatagcacttatgaccacttcatgcaccaagttactttccactgagaggaagaattaaaaaagcaagtgagctccgtgagggtagggctggcatctgtattgttcactgcagtgtttctagtgcttagagtggtacgtgacatggagtgggcccttggtccatccttgctggtccttgctggaccacgatgaatgattggtagaggagttgtaagcgtgaaccctggcactgccggcagccgtctttccagctcctgtacagtagccaacctaaggggctggaaggaacctgcaagacgtgccaagatgagagaaggagaaagccatggctgctttgagtgcccagtttctgtcatctctgagccttattgccatcctacagtaacaagattcatccttttacctcagctaattcccactgggtttctttcacttctgttaagaattcagtaataacatggacatggaggccagaagtaaagacactgtgctctgtaatacacagttctgagtggccaatttggagcccagtgggactgccatctcgtttcttttttctttttttttggagacagagtcttgctctgtcgcccaggctggagtgcaggggcccgatcttggctcactgcaacccctgcctcctggattcaagcaattctcctgcctcagcctcccgagtagctgggactacagacacacaccgccatgcacgcctggctaattttttgtattttagtacaggtggggtttcaccttgttgcccagactggtctctaacccctgagctcaggcaatccgcccgcctcggcctcccaaagtgctgggattacaggcgtgagccactgcacctaaccctgtcttgtttgtttttgacactgcagtgaagcttttagggaagatttttagttcctcgtaggcacttttctggattctttcctaaagttaaggttgaatacctttgagtagtttgagataaaaagtattgcttcttctgtatatcttcatctttgaaagtttataaacttaacacctttttctgttcattgtatcagagaatctgaaaaaaaaacatttctgctgcaggtacagaggggccaggtgtaagcatctctgaagagagacaaagtctggctgaaaactctgggacaacggttgtttacaacccttatgctgccctttccatagagcagcagaggcagaagctgccggtattcaaggtacgtcaaataatcatgttcaacctgtgggcttgaatcgtgtgtctgcattagctttatgctcagcactgaagggaatgatggcctctttctagaacacagtgagctcagagaaacccttactgtaagggatgacttttcatactgtgtattttttagttaaccttataaatcttgaaagtccttaagattttttcagttgcatcgtacatactggaaaactggaggaattagaatgacttttgttttcccctttattcctttcagctgtggacaatttcagatatacagaaaagtagagaaaatagcagttaatttctatataacagattaccaacatatggccaatttttgctttatttttaaagtcactcctttaaacaagtttaattgggaatatgaggttgtttctgctgaagacatcagttaatactctgacttcctctgagacagtgacaggattttggtatggttactacttaccaagtgcacatccagacactcagttttattagcgctcacgaaacagatgtgtgctcagctacaagagaccaaagtgcaaactagaattcattcagaactgttcatttatggctagcaataattctccagtacagatggacacagttgacatatacactttgtccctgttggcacatccacatgggaagccaaattgtaatcaggaagtacagagccaagacaggttacagaaatgtcatacagcccctgatgaggggtgaattctccctgctccacaggatgcccttggaatgacccgagtaggtgtggccaccagcatctgtgtctctttctttctcctggacggtgctgggtgaaagttgctgtgttctatctatctgtctgtctgtctgtctgtctgtctatctatcagacagggtcttcctatattgttcaggctggtcacgaacccctgagctcaagcagttctcctgcctcggcctcccaaagtgctgggattacaggtgtgagcagccaaaaggtgccaagttcttatactcatggagttcttttgactagactgtgctgataattcctcttctattaatgtgttctttctccaaacagataggcaacagcagccttcttaatttagccagattgccttacttggagttttatgtggctcccaatattttagtcacaagtgaactgactgtctctgggtttcttcctcaagtgactaacacattcactatgtatgaatgttagcaagtttgactttcaggagatgaaatgataggtttactattgctttctcaccactgagggacagtttgagctgtgatgaagtgtccggactctggagctagacttcagggttcaaacccaagcttcaccatttgtgtgctgtgtgacctcacttctccattctgagcttcttttctttatctgtgatgtaggactacaggagcacctacctcataggactgttatgaggaccagatgagatcatccatgcagagcatttagcaagatacctgacatgtagtaaatgctcaagtacaagggaaattactgtttactcaagtatttaaattttggccttttcttgactattctttgtctcccaactgtacttacaagataacataaatgaaacagcaaatgaaaaaaaaaaaagcaacaagaagttaagaaatgtttatgaaattaaaatggtaagaagaagggtgtaagttactgatataaagcaaagcagagtttaagtacagttgagatcttataagatgttgaagatgaatcgagacaaaaaggaaaacaagttacctctacgccatcctttttccctttcaaacaaaaagtaaaagtagctttaaaaacagaaattggaggctcggtgtggtggcttacggctgtaatcctataggctttgggaggctgaggcgggtggatcacttgagacaaggagttcgagaccaacctggcaaacatggtgaaaccccatctctactaaaaatataaaaaattagccgggcgtggtggcacatgtttgtaatcccagctacttgggaggctgaggcaggagaactcttgaacccgggaggtgggggttgcagtgagccaagattgcaccactgcactcctgcctgggcaacagagcgagactccatctcaaaaaacaaaacaaaacaaaacaatgttggaactaaagcatcaagagattgttaaagatcactgcctcttccccagcaccattatgaggccacctgttcccttgtctgccttctttaggctgctgtatagacaatagtgactctatcttggatgcaagtctgccatgttcacttctgtttagacccagtcttataaatgcctcctgatttctgctttgtatattgtccttagtgtaagaacatgtcaacctctctgggggcagcactattgacagcttcttgttttgttttgtttttccccaaaaacagtctacgcataaacaagtagatacgtgtttgccctaagaagaatgcagttactagggtattattcacactgttctacatctcacttccttttcttaacatatcttatagttcattccatatcagtacaagtagatatttcctcttcttaataactacaaattattccattattggaatattttatgactgatttaaccaaacttttgttgatcaacatttaggctgtttgaatttttggctattataaacaactctgcaatgagtatgcttgtatttatgtctttgtacacatatagtatgtagcagtatgtctataatttcttgttttttttgttttgttttgttttttttttttttttttttttgagacagagtctcaccctgttgctcaggctgaagtgcagtggcatggtctcgcctcactgcagcctccccccgcctgggttcaagcaattctgctgccttagcgtcctgagtagctagtattacaggcactttccactgcgcccagctaatttttgtatttttagtagagacagggtttcaccatgttggccaggctggtcttgaactcctgacctcatgatccacccccggccctggcctcccaaagtgctgggattgcaggcgtgagccacctcacccggcctataatttcttataagtgaaaatgtaaagggcgtatgcattatgtattttgataagtgttaacacgattgcagttgtattcgctcatactgagaggaacagtacctgagggttagaaatacattttgatagttctacttaaaattcactttcctttgaaaacagctcatttcacaatgtttaaatatcgttgtttaggtcttttgagacaatgtatggctatttgcaaggtgtgttattctttttcagcttaggaatcatattttatacttgatagaaaattatcagacagtggtgattgttggtgaaacaggatgtgggaagagcacacagattcctcaggtgagtacatatttaataagtgtctttacacttcgatttggctggaagaattttgtaacttgagagctctctttactatcatttacatttttaaggtctcctttcaggaaatgttcacttcaactagatattttttattaaacttttagggcttataatttctttggtgagtactaaagtaacagtttgtcttcgatttattataattccaaaatagtaatggaatggccatcttctgaaagttacaatggagatttattcaaagatgtgaaatatagagtttttatccttaaatagttacagttgaaggggtggggtaaaatgaattttgctgtagttgtaaataaaaattggctgttatagtattatgcagtgctatggaagaaccctttcttactaggaaaaatcctatgtgatgtggataggagtagaaagaaggatcaagaaaggccttgtaaaggaattggcatttgaaattgaccttgactgggagctgactgagaagatattccaagccagtgaatattgtggttagaaatactggggtggagaagtgtagggtgagttcagagtgtgtcttaagaaccttaacttgaagagtgaagactgactgagcttgagagaccttgcaggttcttacttccttttttaatgttaattttcttgaggtatgacatatatgtaggaaagtacctatatcataattgtacaccttgatacatttctgcaagtggaatacatctgtgttaccagcacccagatcaagaagcagaacattaccaaaacctcaagaactcttcttctgtgttctgttctcatctctaactgccatgtctgcttacccctacaatcatgaacacaagggtagctcttattctggctactaacctcataaattagttttgcgtatatttggaattttataaaggaataatatagctgcttttgtccaacgttatgtgtgagtcttccttggtgttgaattagttgcagtttgttcattctcattactgcatagcagggttcggcaagtcacagccagtgtgccagatgcagcccgctgcctgttttgtagagaaatctttgctggcacacagccactcctacttgttgatatattgccggtggctcctttcaggctaccacacagggttgaacagttttgacagagaccctacgatcctcaaaacctaaaaattaccatctggccctttacagaaatgtaaaatgtaatgctaacccctgctagttagtattccactctatgagtattctgtggtttgtttatttttcctgttgttactgacatttgagtcattcctagtttttagttatggatagtgctgctgtgaacattcatgtgcttgtctttggtgaacgtatgtgcacattctcctgctgggctctacctaagagtagcattgctggatcctgtgttcaactttagtaaataatgtctaagatattcaaagtggttgtgtccttgtagggtttgcaagcaagtaaacaatatgacaagctgagctttagataaatgattatattgagatataaggtgacttagaaactggaggaggcaggccatagaaagctattgcagtggtctagagaaggatggtgtaacggggtcctcaaccaagaggtgatagtgggataatctggtgaggatgggaaggagaacaatttacaattttagcgttagggtctgtagacattagaaacttaggttggtgcttttgcaccaatctaatagatggatatttgtgatgacaaaggggaagggacaaaggtgcacagtgactgatcacgacttgctgccttggcgaacagtgctagtattaaatgtgatagaaaagtaaagattgtttttttgaggggaaattaatgtgtgtgtttttaaacatatttattttttcctatattattgatggcctttgatgacattagcaggaagtttggaatgggaatctgaagcttggcagaggtcagacgtagaaggtgtggacatagggattgaacatcctgatacatgcaggaaggagatggaacagaaataactgagaagaggattaaggacaaagtccatggagcatcaacattcaggagtcaggagcagaaaggagatagaatggcagccagggaaatgacagaggaaccagcagactcttcatggttagagaaagcaaagacagagtgaggtttctggagaggtgggtaggtggcagtttcagccaacagagcggccagggagcaggagaactggttcagtcctgggttattcatcttggagatagcacgtccagtggtagggttttagggttaagggtgtctaagggtaagatgataaaaatccctttgcatatttgaatatgttaacaatgtgttgttgactgtttggtccagacttgtggtcatgccaggatctgtgtagatctttttttttgtctgctccccaactccattttgaataatgggtttataaataggttgggacccagatgtaggtatttttttaaagtttcccaatagacagctagggaaaggtagacagacctagtaaaggtagatgacctagtaaaggacaacttgaaatgcatgcagcagaggaaatggtggcctggaggaaaaagataaccgtatatgcagatggaattgagagcctagtaagttactcatttcttacaggaagaaacaggagaaaggttaaattactgtgtgattgtcatttagagagtaatataacaatagtataacaagtaataacagtaataagtgctacataaagtgattttacacatgttgatctgtttaatcctcaatgaccctatgaagcaaataccattattatcttcattttataggtgaggacactgtagagagtaatgaggttatggaatatagaacagaggtaaaagaccacatgatgttccagaattgtttgggaattagtctgtgacgttatgtagtcagcttaggataaactatgttctggtaacaaagaacctgaaaatctcagtggcttaaaaacacaaaggtttatttcttgctcatactgtgtggttatcttgggttggctttgagattctatcacatcatcattgggccttaggctgatggtactgctcttatgaggcacttgttgatcttgtggtagatggcagaatcatgagacagctcttaaaacttctgaccaaaagtgggccttctgttcacatttcattggtcaaagcaagttatatggccaggcctgatagcaacggggtgacagtgtatataatcctcccatagggatgggtggcaggtatttggaacaatgataaatatatcacagtgatttggccatttactcctgcaaggcttagctgccagggaacagagagggcctgctgtgttactaagtccagggaaagctggtgggaaggagaaagagcagaggctgaggatctaggctgggtaatgtgggcaaacaaaggtagtttttttttcttttaattttaagatttgaatatttttaatatttttgaacattaataggttcacatgatttaaaattcaaaaggcacaaagggacatacaaagatttccttctgccctgtcttcctggtacccatttcctttgtgcagttataatcagtattatgagtttcttggtagaaattttttcatgcatttacagagaagtgtctgtgtgtgtgtgtgtgtgtgtatgcacatatatgccctattttaaacatgaaacatctatacatgttttagtatgccttgacttttttttttttttttacttattctttcattttaaaaaaaaactgttttgaattgacacataactgtgcatatttatgggatttagtgtaatgttttgatatatgtatatgttgtataatgatcaaatctgggtcattatcatatccatcacctcaaacatttatcatttctttgtggtgagaaccttcaaaatctcccttagctattttgaagtctatggcacattattgttaactatagtcactctgctgtgcagtagaacaccagaacttattcctcctatataactataactctgtgcttgttgaccaaccttttattctccctactccctgttcccctcttccctctgcagcccctagtatccactgttctattctctacttttgtaagatcaacttttttagattccacatgtgagtgagctcatgcagtatttgtccttctgtgcttggcttatttcacttaatatcatgtcctctaggttcatctgtgttggcgcaaatgacaggatttcattcttttttatgactgaatagtattctattgtgtatatatatcacattttaaaaaccagttcatctgttgttggacacctaggctgattccatgtctcggctgttgtgaatagtgatgggagtgtacatgtctctttgatgttctggtttcctttcctgggaataaatacccagtagtgggattgctgcatcatatggtagttctgtttttaatttttcgagaaacctccatattgttgtccatagtggctgtactagtttacattgtcaccaacagtgtgcaagagttcccttttctccacattcttgtcaacatttgctgtcgttcatctttttgatagtagccattctatctggggtgaggtggtatctcattgtggttttgatttgcattttcctgatgattagtgatgttgagcattatttcgtatatatgaaataatacactgtgcatcttcttttgagaaatgtctattcaggtcttttgcccatcttttttttaactttattaaaatactgagttttatttcacatttattttacatatttttgtctccccaccatttccatgtctgaccaccactactattatgtcctatcatgacattccatacatacctaaaaccaagcaaagggtggagttccatctttaaaaatgaaacaggcattttggacaacgcagtcttggcaatggaacctggacaacatttatcaaacacggtagggaaagttctcactctgcattataaaaagaacagccagatatcaactgttgctgcttgcatttttgctttagtgttttctacagaacttttgatattttaggaatttttttcttgttttttgaaggattcttgtccttttgatcttggtgttggtggtattgagtcttttccattctgatttgacttttgtgcattttttggctggagtatcttgtatagctttctttactggggctttttcttcagtttcctcatcatcaaaatcatcatcattagcagcagcagcaagttttacttttttctctggaacgttgctaccacctccaggggcagatcaccttccagatatacttaagaatttcacatcttcttcctcttcatcttctgactctgcatcttcctctacagctactaagtgctgtccactaatatgcactggccctgagccacacttcaactgtaagaccaccggtggtattatttcaaagcccctaagggaaatcattggctgtacagacattttcaaagttgccagtgttactttaattggactgccttcgtaattcattgcctctgcttcaacaatgtgcaattcatcctttgcaccagcccctgagctgaccgttcttaaagataactggtgctcatcttcatcattatccaccttaaagtgatcatctttgatggcctttagttcacaaccaaaaagatagttctggggcctcacagggctcatgtccgtgtccatcacatctttcatggggtggtggcacgtacttaggtgggagagaaggcggatggagataaatgacccctgctccagagaacagctgtgcagggcggaatcacacccttttgctcattttaaattggatttttagttttttgctattgaattgtttgagcaccttatatattctagatattaactctttatcagataatagtttgcatttattttctcccattctgtaggttttctcttcactctgttgattgttttcattgctgaacagaagctttttaatttgatgcaatcccgtttgtctatttttgcgttttgttgcctatgtttttgaggtcatatccaaaaaatccttgcccagaccagtgtcatgaagtgtttcccttctcttttgttctggtagtttcataactttggtcctttcatttaagtcttttatccattttgatttgatttttatatgtggtgagagttagggaactggtttcatttttctgcgtgtgattatctagttttcccagcaccatttattaaatagattgtcctttccctaagatgtgttcttggtgcttttgttgaaaatcacttgactttaaatgtgtggatttacttctggattttctgttctgttccattggtctgtgtgtctgtttttatgtgaggaccatgctgttttgtttatagctttgtaacgttttttgaagtcaggtaatgccttcacacttggtcttttttttcacataatgtattgttggtttttttttccagttccatagatgctagtatgtgaacataatttaccaatccccaattgatagacatttaggttgtttacagttttgtattatcacaatgatgcagtggagtcagtttgcacataaatcattttgcacacatatagatatttttatagaataaataaaatacttatggggttgctggctcaaaacacatgtgcatttgaattgaattattttaaggaattgcattttattataaactttttaaaaataggaaatacatttacatagtacaaaattcaaaaagaacaaaggaataaatggtgaaaagttaatctcctaagctttgctgttgaaaatgactagatcattgtaatagattgtattattggtccaaatatctgctacccctcttatggagtattcccttttctcctagccactcagttccccgtacctgagacagtcactgtttccaacttattgtgaagctaaatttgggctatgatctaggaaaattggaatggctgaggaactaaaggttacagcaaggatacggagcaggtttttctctcttgttagatttatatagtacctttccttgggaaaaaacaatgtgcaaaagcactggatacttaataattttgaaattctacaaactatatgtagaacctagatgattttttttttttttactagagttctgtaaaaaaaaaaaacaaaaataagggctatgaacacaagctcttcttaagtacaatttttattagtactgttattggtggagttcttcctaattctgtcctttagccagaagcccagatttggtgatccttaaaaagagtggagaactcagatggacttcagctacgttttagtgatctccctccgtgactctccactgcctcttgacgttagcactacacctgctttttcagtagctttaaatttccacctctcagcaatcataagcatgccatagaagtctgaatcacacagggtattgaggtgactagctttatggacaggcttatttttatggaaattgtttttctttcacttaacactactgctaagagattggctatgtgtgtttgaagtaggataatatgttgtgttctgtttatgtgtcatgactttggtttgctgagcttgaagtccaggatacagatttttatttgtttccttggacaaattatgtggcctctttgtttcctcatctgtgtattgttgatgatgatgttaccttccttatagaatttgttttgaggattaaatgggtcaatgcatataaggcactcagtacagttcctggcacttaataaggtactcattgactcttagctattattcttatagttctgttttttttttttttgtatttgtgttgattggggtggttggtagtattttgtatatgtatttaatacaagataaactttatagtttttatagcaaaaaccctacattatcttcaaccctttgtttcttacagtcattttctaaactttatttttaactacttttagactaatagaaaaattgcaaaaaacaatacagaattcccttatactcttcactactagtgcagagatcgaaagcaggccattaacattggtacaataatagtaattagactataggccttatttaaatctcatcagttttcttactaaggttcttttttagttctaggatcctacattgcatttagttgttgtttctccctaatcttttctaggttgtgcgaattcctcaatatgtcttcatctttcatgaacttgacactttaaaagactaatgggatttactttgtagaatgttcctcagtttgggtttatgtcatgttttctcatgattagaaggagcttatgtatttttggcaagaatactacagaaatgatattgtatccttagtgcatcatttcaagggttcataatgttgatatgtcttgtcactggtaatagcaactttggtcacttggttaaggttccagcttttgcctgtgaaactactgtctttccctttttagttgatatgtatcttgggggacatattttcacactgcaaatagtctacttttcttccaactctcacctactaagtttagtatccccctcagtggatcttgtctgtagcagtgatgattttcttttctcctctttccctctatctttattaaatgtaattttctgtaaggaagaactgtgctttcttcctcacttatttcttagattatttgcgtgtatcaatatggattcatagatacttatttttttctatgtgttaaagcccaatactgtcattatttattgtgttgctcagattgtttcatctttgaacattagaagctccttcattttggctcctgttttctttctaaagctttcatttttttgaccgcttccttactttctagtactacaagatgtttcaggcttgtcttatattttttcctacacaagccctggttccttttattggagaatgatgtttagaaatcatgatctggggccgggcgtggtggctcacacctgtaatcccagcactttgggcggccaaagtgggtggatcacctgaggtcaggagtttgagaccagcctggccaacatggcaaaacctggtctctactaaaaatacaaaaaattagccgggcatggtgttgcatacttgtaatcccatctactagggaggctgaggcaggagaattgcttaaacccagaagtcggaggttgcagtgagccgagatcacgccattgcactccagcctgggcaacagagcgagactctgtctcaaaaaaaaaaaaaaaaaaaagaaatcatgatccggatgctagagtgctcattgctacgagatgtcattgctgagtctcagtgagcagacttaggaaatatatgtatgaatattaagccatacattataaaaacatctagctatctgtatctgtctatccatctatattttaaacaccatgagtttatgcaaatgcttctgattccaatctaataccatagggctcttttgagcctttctttatttataacttctctgcaacaatgagaagcttagtccttatcatctacagtatatttgtggattcattaaaatagtttcagaattgctaacttgtaaccttgtttggatatttactaactagattacagcatttatgtacagttctttctgtctttagccttacaacatacagtcaagatatatttttccatcattccttaggtaagttcttttcttctccaccccctgcagtgtggttatgttattcatttgtagtatagaaagggtcatctgttagtgtttatatttcctttaggtttccctccacatcctggttggttttatttgtcttctgggtgtttaaaaagtatgtgaaacatgcatggctgtgattctcagagtcagagctacacaaaaagatctattgagagcattgacacgccctctttatccctgttcccctccctccatttccccttctttctacacctttcccacccattccctgtagacaaccatttcttagtatctatattatccttcctttatttcttttgaacacatgagcaggtacacgcagtaacttttaaaatcttttttctattgtagaagtaatacatgttcattgtaaaactattagatgttagaaaaacatgtaactgataaccactgttatccgtattggattttaagtgcatataatcaaataaatacatagatattaaataagtaggtaactcagataaatacacttaatcaaattttttttttttttttttgagacagaatctctctctgtcacccaggctggagtgcagtggcaggatcttggctcactgcaacctccacctcccaggttcaagcgattctcctgcctcagcctcctgagtagtcacgattacaggcatgtgccaccacacccacctacgtttttatatttttggtagagacggggtttcaccatgttggccaggctggtcttgacgtcaagtgatctgcctacctcagcctcccaaagtgctgggattaccggcatgagccgccgtgcctgttcaatcaaattttatatatgtgtactaatctaatggtgtatagtcatatatataaaatccagttgttttatttaatatggctgaaatgtgttgtgtggttgatatttatgttgagccatctctatatgtgcttaaaaattctttgttctacagagttagcactgttttgagtgacctgtggataattttttgttccctgaggcatctgtagtacatggtgattttccaggactggggtgtcagaatgctggaattgcgccttagttcttctgttgatcagctttgatgtgaacttaagtaaatcacctaacattaccaagcctcagatcctccatctgtaaaataattcccaaagttctgctgggacaagaactgtactttttcctttcttagtgattttaacacaatacgggagcatcttgggggagattgctctgcaaaagtggtatcatatgtatacttagatgtgattttgtttgtagtaccttgcagaagccggctggacagctgaaggaagagtggtaggagtgacccagcctcgaagagtggctgctgttacagtgagtttctttttgtgttggaaagattctatctgtgttgtctacatttgtgatttgtttacatttcctaaaggctttaaatgaatagaagttgctccttaagagtttaggtcttcagtttttatgttttttttatttttatttttttcctcagacagagtctcactctgttgcccaggctggggtgcaatggagctatctcaactcactgcaacctccgcctcctgggttcaagcaattctcctgcctcagcctcccgagtagctgggattacaggcatgtgccactacgcctggctaatttttttatatttttagtagagacggggtttcaccatgttggccaggctgttctcaaactcctgatcttgtgatctgcctgcctcagcctcccaaaatgctgggattacaggcatgagccactgtgcctggccaggtcttctgttttaaaagaattatgatttgaatatttttgttaaattgatcctgcacattatgaacgttttaaacaataaagtgctgaggaaataaaaaaacaatatatttttaaaaccccaaatttcaccatccaacataaacaatgtgaacatttgtgaacatcattccaagcttctcctaaagatgaagatgaatggttgactggctggatagaaataattttataaaaatgagatcatatttaatatttattttttattgaatttaacaaaataggaaactttagtgaaataggagtagcgactgtactttggataaatgttcaccgcaagataatttattaaagcttgaaaagtaagaaaaaagagtacaaaaaaattcaagatgttacctatatttcaaattacgccttatagtttcctgttatgaaagaagaggaaattagcacatgtattcttctttccaccttccctttctccatttgttgtagatacagtcctgtcattttcatttcaagatttataatatacatgttcttaatcataattctcacaggtgtttaaccttaattctagcttgaatggattcattactcatcattagttattttctatggttttgctaaccttgaattgcttgttttgcttttatttcttgtattggctgaattttatcattcagcttttttttttttttaatatgcttgagaatgttcagttgtggtttttgttgatataaaattcttgattcacactgtccctgcaaactgcagactttgctcactgccttttggcgttgaggatcactgtgtagaagtctgagccaccataagttttttgttgatagtatgtttgaattcttttgttgtttttaaattagctctgagagattgggtgtggtggctaatgcctgtattcccagcacattgggaggccgaggcaagaggattgcttgagcctaggagtttgagaacagcctgggcaacatagcaagaccctgtctctacaaaacaatttttaaaaaaattagctgggcatgctggcacctgcctgtggtcccagctacttcggaggctgagccagaaggatctcttgagcccaggagttaaggttgcggtgagttatgatcgtgtcattgtactccaacctttaccctatctccaaaaaaaaaaaaaaaaaaaaaggcttaaagaaaaggaagtagggcctttagtttgtggcctttacctggacaaacaattaattctatttccccaagttatttttgttctgtactgagttttaattattgtgtcgttgttttgcccaaagttcattttctaatggtgttcaattaagaagttatacagttttagaagttatgtgtgtgtgtgtgttgtgtttttgtatgaaaatggggctaacagtttggaaaccaagttgcaaatgctgctggagttaatcttttttgtcactaaaagatgactcagttacctaaaattagaacaatttttcctgtttgtggtttggaatcccagctcttaatcagtttgcatcttagttccaaatttgtagccatggataacttccatgaaaccacagctttctcttgaaagagcaaagagcatgtaatatattaatagagctgtcaagtttgaaatgctacatctcagaaagtactttatgtgcagactaaaatctgcaaacaatctcagagcctaaaaacagattgcataagctgttgcttgatctctgtgagaggcaattagtagtgagtatgcttgttgaactcatgtggtctgggtttgacttcaagaccaggtaggtcctccctgacctgtgattcagaataagctctaacacctgtcttatttcagtttcctcatttgtaaatacaacagtgtctcgtctacctcatgggctgtgtgtctatttaatgagatacaaatttgtgaaagcttagagcacagcacttgccagtagtaggtgctcagtgattttttttttttttttggtcttttacctccctttccttttggtctgtcaaaaagatagtatttgtccagtctagttgatgaggttattgggagcagaactaaagtgatagagataaaaatctattaaaaagccaagagaatataaccttgtgtgattataaataataaaaatttaaaaatagagtttgaaaataaaaatacatactttttatagcaaatgtattcaaatagtgaaggagtaagaataaacaggtttggcttttaccttatagacccataaaatgattatatttttacagagatttgttaatttatgctcatttttttaaatttaaaatttttgtgggtacatcgtaggtgtatatatatttatgtatgctcattcttataagcctattttctccataagttcctagtatctctatgcacacattctctacctgtaccatattctgagatttataatataacgacatgtagggttgaaattggaacagtaacaataacaaatctgtcctggtgaaatgctggtcattgggaaatacaaccaccagaggcagagcaatgtaggataactttctggtttcataagacgttttgaaagcctacatgatatagaccagctgccagatgattgatttggttttggcctccccattctataatttcaagtcaccaggcagagctgcttctgatcctcatctgctcttcagtgtcttaaacactgatgggcaggaaacgcctgggtgtgcctagctcagaagctgagggcagggagcctctgccctcctgagcctggggctgctggggtggaaaggctggagcagtaagctctgtctcaggacaccacatgtgccagccatgttctaaagtcaggacttgggaactgcgtgggtgctggggaggttgtctcacctgtgaaagagggagactgaactccttccttctgtggggattggtgtgctgggccctgggaaatctctattaatattgcttccctttggttcttttcatttaggtagtttatgtggtggtgaatactaaactttcttttctttctttttttgttttttgacacagtctctttgtcaccgaggctggagtgtagtggtgtgacctcggctcattgcaacctccacctccccgggttcaagtgattctcctgcctcagcctcctgcgagtagctgggattacaggcgcatgccaccatgcccaactaactttttgtatttttagtagagatggggtttcaccatgtcggccaggctggtcttgaactcctgacctcaggtgatttgcctcccaaagtgctgggattgtaggtgtgaaccaccgcgtccggtcctattttcttttaaattaaactaaatgatattcattattgctcttccacttttatgcttgttcattcttttaaatattttctattaataagttaacttttgaatagccttcttgggggaatgcagagatcttgctgttggattcatttttctctttcctgcattcattttttatttgttatgttttgatggatgaaattttgtctatagtttatggtcttcataatgtattacatattttgtctttcactttattatgctaccttggattttttattgatcttctcatccactcatctgccccctttgttttaaacctgagtttgtctgtatttcccctctcagtggctttggcagctgggacacagttgtgaactgtttcaggtatctcattcttgaaacttagctttttgccttcgatgagaaaatgaaactggcccagctttgaatatggtaattcctgttctgccttcatggtcccgggggatgggttttcttttcgagcgtggagatgaaaagttgtccctggttagtgtgccctttgtttaggaacagggtgaatcttgtcatttcttttactttcctttttgctttggccaccaaatttagagctgaatttgtggctcaacttgaataattttggcatatctatgtttaacattttctcattggctttgatcttttgaaattttttctgtaattttttggatcttgatccgtaacatttttatgtgattttgtttttcattgtgtatgttcttataagttgccccaagaccattatagaatgaagtgagatacataagttaataattggctgggtgtggtggctcacgcctgtaatccctgtactttgagaggctgaggcgggcaaattgcttgaggtcaggagtttaagaccagcctggccaacatggcgaaaccccatctccactaaaaatacaaaaattagctgggcctggtggcgcttgcctgtaatcccagctacttaggaggttgaggcaggaggattgcttgaacttgggaggtggaggttgcagtgagccgagattgtgccactgccctccagcctgggtgacagagtgagactctgtctcaataataataataataaaaattgcaaaagttattatgcttgttctctaataacttgtctcttttcatttttcattgtgttcacatactatttaaaatataaatgacctttagattttccatagtatgtgcgctgtgcagtaatttctatgtctctattttcagcatgatctttcttcccaaaggttgcagggagagtagctgaagaaaggggtgcagtgctgggccacgaggtgggctactgcatccgctttgatgactgcaccgaccagctggccacgagaattaaggtaaagtgctcaagctgcttttcctagtggaaataaggaagaaggttattttgggagaattaaaaacatgtagtccttgctgctgtacaggacattgataccatggcagaaagtgaagaaaagtatcctgacattcagagactttagtcagctaggagacagagagctcttccttttttcttttttttttttttttttgagacagagtctctctctgtcacccaggctggagtgcggtggcacgatctctgcttgctgcaagctccgcctcctgggttcacgccattctccttcctcagcctcccgagtagctgggactacaggcgaccgtcaccacacccggctaagttttttttttttttttttttttgtatttttagtagagacggggtttcactgtgttagccaggatggtctcaatctcctgactcgtgatccacctgcctcagcctcccaaagtgctgggattacaggcgtgagccactgtgcccggccgacacagggctctttcaaagagtcctgcaatcttatcccagaaaggagcttggaagtcaggtttagtccttgattccaaagatgaagaggttaagggcttggaaggttgaatgacttgcctgatattatatgccaatcagtgataggaccaagactcaaagctgtcttttcttatgtgtattttattgtattttcactgactcaaatagcaatcgaaatatagaaacaagcctgtaaaaggcttaaaaatagagtagtataagttgatgaagtgtagaattcatgaatgttgtttcactaattagtacttttccattttcatatgaaaatggattttacatgtgtgttctttggccttgttgctaatgttaaaataattagtatcaatagtaatcagtgtataatcaactcaacagggtgtgtactacctaccaccgtgctagaatcaaagtctaatcagacagtgcaataaaacagtgaatgaaaataatctgatgaaatgaaaattgattattagaatctcagttacctcttaatttgcaacagaggaaaattgaaaatcagatgagctgaatgaccaatgtagtgatttgtaaaaatgtagaccttattttccagattgccatattttgttatattcattttgctaggtgaagggaatatttttctgtaccatcaaatatatttgaactagctaattttcagtggtttgcataaccatgaaaacctttgagccgtccataaaaaccttttgtattccatttggtcacaatttcaaggtgctcagttctcgactggtgatttgtcattggtggaagttctcactacgtatgtatgtggcagctagtaccaggtccaagaaaaatatgatggcaatgcatcctgctcttaaaacaaaaaaagtaaaaaacacctaagatacagcatgcaagggagatggtttaacctgaaaacaaattcagtacgttaagaaggctgttactgtatgtgtctgaagcattttataaagattcattaatctgaaataatattagctgacttttcttaaacactactctgtcctaggtcctatgctaaacgctttacatgtacagtcagtcctctgcatcctgcgggttctgcatctgtggattcaaccaaccttgaattgctaatattacaaaataaaaataaaaaataatgtaaatttaaaaaaatacagtataacaactatttacataacatttacattgttttagtcattctaaataatctagagatgatttaaaatatatgggagggtatgcataggttacatgcaaatactatgccatcttatataatggacttgagcatctgcagattttggtgtgggttgggggggtttctagaaccaaccccacaaggataccgaggaactactatactatcttatttatttttcacattaacttggtgaggtaaatactttgattacctcattttacaaatgagcaatcagggacagagaagatgagtaacttgtccaaggttcacacagcttagtaagaggtagagccaggatctgaactcccagcagtctgacaccatagcccatgtgcttaaccatgatcctatctagagtctgtaaaataatattaattgaagtttaagttaataacctcaagaactgcaatctatagtctttgggacatttgaagagcaattatcttacacttagggtgtttctttgggcagataccagttagtcttcactgcctctttatcgatagtactggtggtgcaagcccagaggaaatggggcatagctgatgttcccataataaaggcaagtgaaattctgctcaaagatttgcaactccagctgaggaccctgtgtttaaagccttttgtgaacaattacattgcttgataacgaaaatatgggggcattttctcacagtcctttgtgggaatttacttgtacacatgctggcaaagaggttgcacttgaacttaaaaaataccattaatatgtagtgtaagtgaattatttctaaagctttgtgtttttattttttagtttcttactgatggaatgctggtcagggaaatgatggttgatccgttgttaacaaaatataggtaaatgtgtttttcttatgatagctttcctagtttccaaagtccccaggtagacggagaagcaggtgtgttagtagctgggattcacgtctgtgttcagctgccccaaagcttttctcttgaccttggctgttgggacccttggtgtttttctcagaatttaaatagtatggccctttacagacactcaaaaatgggcacattaaaattcctatcattacttagtctggtgacttgtcctttttattttgccttgtcacactccagtattgatggtgactgcagagaactaactgccctgtgttaaatgtaatatacagagtccaaataattttttatcacttccccctctttgtctatctgtctgtcactcacagcattaaagctgtcctacctaggctctggtgttctcgaggagagtgtcacatttgaccccctggcccacgtgtgtcacaactgtagtcagctacctctttgactgttgttatagcttaacagtcttcagatggttgggctttgttctgatttttatgtgttctgtggggttataggttggttatgttttcatttaaaatcagatattaaattctgttggaattcagtgtggatggtaaaacgcttaaagataacaatagtacactttttaaaattcaggtatgttaatgtcaccgtttttattaacctaagaattgcctcattgtcaaagaagagtgacttaggtttacttttgatgcaaagtgattgtatgaggactaaatacccagaagctctttgatggtctagatgagatgatgtgtggcttttttagaggctcactgagagcttctctttgattcttagtgtcatcatgctggatgaagcccacgagaggaccttgtacactgacattgccattggcttgctaaaaaaggtatgacttcactgccagcttttcattgtgtgtgtttattttattgcctaattacaaaagcaactgtagcaacttggaaagtacaacaaaataccaaggaagaaaattaaaatcatccataatcctacccattcagagaatatcagtggtagaatgttggtatattttcttctcttttctgtgtgtgtgtgtgtgtgtgtgagtgagtgtgtgtgtacttggatctgttttggcatactagggattgattgaattatatatactaatttgtatcttgcatatttcccttaacattacattaggatcatttttctgtgtcatttaaatattctctgaagatattatttttaatggctatttaatcacatctctatcataaagtatttaacttcccctactgttagcaatttatatggcttgcagattttaaatattataaatactgttgtagcaagcacccttgtaattgaatctgctgcatttctgtttattttctttaactttttattattaaggtttcatacatatcccaaagaagtgtataatgacccccatgtacccttcatctggcttcaacaattacaactcacagccaatcttgtttcaatcttaacctccactctctcctcccttcccatattttctgattgttttctttggacagattcccaattagagtctagaaagaagtggtagaacagggtgattaagagcataggcattgagtcagactacctgggttcaaattctggctttgctgagtttactcatctctaaaatggggaaaatagtagtctctatatctgtgctggtatactttcctttatggtagccactagccacctgtagctattgagataaaagttaattaaaatagaagaaagtaaaaaaattcaggttctcagtcacgttggctatttttcttttcttctctcttttttttctttttttgagacggagttttgcccttgttgcccaggcgggaatacaatggcgtgatcttggctcaccgcaacctctgcctcccaggttcaagcgattcttctgcctcagccttcccgagtagctgggattacaggcatttgccaccatgcctggctaattttgtatttttagtagagatggggtttggttcctccatgttagtcaggctggtcttgaactcccaacctcaggtgatctgcctgcctcggcctcccaaagtgttgggattacaggcgtgagccactgtgcccggccacattggctatttttcttttctttttttttttttttcacgttggctatttttcaagggctctatagccacaggtggctagtggcttatgcatcggacagtacaaataaggaaagttttcatcattgcagagagttcttttagacataggtactgtatattgtgatttgttatgaagcttaagtaagatagcaaaaaacttttaggttggtgcctggcatagggtcacagctagactgtgaggttcttttgtgcaaattagaaaaagatgttccctctgggaggatgtctagagctaggtgggaggcaggtggaccggattgctgaagcccctagccccctcagccaggcatctttgcacagtgggtacactgtgtacctgtatgcagggcctctgggctagcacataagttagtctgtattagttgttattattattattttcattgttattttattccattgccaaagatttagattttttgatactttaagggaattattgtaccatgttattacctttttcaggaacggtataataagagggccgatttcactgaatctttgccaacactgagtattagccttaaaaaaataaatccttgccaatgggatagatggggaaaaaaaaatctcattgttattatatatcttagctgtagctcatttggtcacttctccaatgcctgttgattatgtgtttctttgagtaactgttaatatcttttatctcttttttttttgccatatttctgtcttggtgttatcatttattgtttgtttgcttttaatatactttttcatacatagattcaaactatcttgagacccaggtgtcaggaaaaaatggttttattctcagtaaattcaaatttgggtcttaaagcttctttatagtttttataatttaaaaaaatttactttggaaaattgcatacatttacaaaattggaagtaatagtgtaatgacccccccccccctttattgacaattattaatttgtagtcagtcctttcatctgtaagctcccttacctcctcctcaggcaaaaaagaaaaaaaaagacactgaatttttgaaatacatttcagatatcaaatgatctcatccataagtgttgcactattatcattatttccaaatgtcttcttttttagattcagaaaaagcgaggggatcttcgattgattgtagcttcagccactctggatgcagacgtaagagccttgcctcccctttcctcctctcctcacaaacacttttgtcctatatatccttgggaagttacctctagcaagagcttatctttggcagaatgccctatcttctttatgggaccatctgatgtcctagatttcatataatcagaggttactccttttcagcttgtgaaattagactgtaattaattgagctcataattacctacctgtcttgtttatctacatactgtctttctccccacttacacagcttctttttgttgttttttcagtataagcctgtatttcttgaatttgtttatttatgactatactgtatagatttagatttttctgtgcaattgaagtttctcctgggctgggcacggtggctcacacctgtaatcccagcactttgggaggctgaggtgggtggatcacttgaggtcaggagtttgaggccagcctggccaacatggtgaaaccccgtctctactaaaaatgcaaaattagctgggcgtagtagtacatgcctataatcccagctacttgggaggctgaggcaggagaattgcttgaaactgggaggcagaggttgcagtgagctgagatcgctccattgcactccagcttgggcaacaagagcaaaacttcatctcaaaaaaaaaaaaaagtttctcctgtatatataataatttccatgttaaagttttctgtggctaggtttacattatttttctctcttgtggacctatagtttaaacagcagctcaactcaacaaatacttttgaccacttactatatttacatgcagaaatagatgtttgcagttcagtgtgttcaaagttctgaggcagctaaggagggagcccttaactccagccagctggggggtgtccagaaactttcgcagaggtggtgacctaccagctgtgcttgaaagatggacagccgttttccagatggatgaaggtggggaagggcaccctaaatataagtgaaatcacagggacatgaccatgagttcatggagcttcgagtcttatcttacctgccaggccctcatgggtgaattacccttgaactccctctctgactttatcttcttccactttctccagtgctccctacatttcagcctcactggtctccttgctgttcctcaaaacaacccaggcatgcttctgctctggaggaaccctctttttagaccattccttccccggacagcctaaggttctctcctaatttcattccagttttgagcatttattatctcctcagagaggcgctctctaaaacagcaccccagttgctctttattcccttattctgattttttttatgtttctcacttgtctatcactatttaacattatatgcattgtttattgtgtgtctcctgtcactaaaatataagctccatgaagatcaggactttgtcttattttatctcttccacctaaaacaatgtctagcacagagtaggcacttgggttgaatgaattttgactgactgggaagtaatggaagattaaaatggggaggttggggtcagatgacggaaagccttagaggctcagccagagaggatgaactccatcctgtatctggttgggagccatgggaacatgtgagagagggcagtgacttcatcatgtttgagctctataaagatcattctgagtgctgtgtataggagatgagagtagatatggagtctctagtaaggaggccagttctgaaatccaggtgagatgtggtccctggctcctggctcctagtctccctgtggcttctgggatacagaacaacttggagagagagaaagcttaccatagcgaaggtaaatgtccaacgtgtcccgagactggtttctcagacctttccacaggctgtaggagtctgttgttttaggtctgcccatggtaacttttgggttaaagctcctctgttgccctgtttaattgtcatctccctcacccatggtatctgctggcatgctattttgtggactgtggctgacttcacctctagttagctcctctgtggctacattacacagaacatctgtatctctttttcaccccccaccttaaaaattattaaattaagttaaaaattattccagtttttattatgttgaaaactataatgtccaagtcttttcttagattcattttatttatttatttatttatttatttatttatttattttttgacaccaagtctcactgtcttgcccaggctggagtacagtggtgtgatctcagctcactgcaacctctgcttcccaggttcaagtgattctcgtgcttcagcctcccaagtagctgggactgcaggcatgagccaccatgcctggttaatttttgtatttttagtagagatggggtctcatcatgttggccaggctggtctcaaactccggacctcaggtgatcctcccgccttggactcccaaagtgctggatttacaggcatgaaccaccacgcctggccagattcattgttaattaatacttactaattgttcacaattgccttttattgtcttggtggaacacagagatgaaaaaaatagcttctttcagttctgtctatggtagttgatatagatgactttctggaagcaattttgtaagcgggaagacagcatgtaggaactttgtcatgccttgctctgctgtggtacgggacatgctggacctctggtaagctgggccattccttcttatcctgtccttgctgctcagccagtgcctcctgtgtgaggggaacggtggtttctaagtgtctgtgaatgggggatctgtgtgtgtgagtcatctctgtgtgggttgtgggtccgtgtgtgaggggcctacgtgaggtatgggatgtgagttcgtatgtgagtgaaagaaagaaagaggatataagtgggcgaaagagggcaagaatgaggactatgtgggagtggcaggggggttgggtgtggcttaggaaacattttgatctagaggcgtagggaagtccagaactcatcccctgccccccagcggctgggtctgtgggtgacagactaatttcaaacctcctagagctagggctgctgataggccacctgccgtggtttctctcagggactggggtggcccagcctgcagacaaagacagcagtggctgcagccgggaggcagagacctgcagagcatgatggggctgatcgaatagctgctttggttgctttatctgctttcttaatgtaagcccaattaaacgaacaattatataacatgactggatataattatgaagtatttattgatcctgtatcacgtgatgatattgcttttcttttatttgcgtccaactgcatggcagaatatatggttgctggtagctcccatagtttttttgtcataagtccagctacttgaagagagactaatttctctttccagattcttagagaaggaacttagcatcagctggggtcaggtctccaccctggaccagtctacatgggccaaggctgttggccaatcatgggtgtgttgggtagacatagctgcttatcggccactccagtgggttaggaaggagcaggtaccagggaaggagcctatggtgagctagaagacaaccctgcagatggccatatcatttacattccatttcatagactgtcccctgcctttttatgatgtatgcttcttaccatgtctgtatgtcaatgtgaccccacctctttcaaacctgactcaaattcttcttttctgggtgtgttgaacttattttactcttcttgttccttgattctgcctcaagattcttgcattgttggtactatatttatttacttttttatgtattttgtatttccaaataaagatacaagataaagatcttaaaggtcttgtgccttctcagtaaatgctgagtcttaattctttttgttttgagacagagtttcactcttgttgcccaggctggtgtgcaatggagtgatctcggcccactgcagcctccgcctcgcaggttcaaacgattctcctgcctcagccttcctagtagctgggattacaggcgcctgccaccacgctcagccaatttttttgtatttttagtagagatggggtttcactatgttggccaggctggttttgaactcctgacctcaggccatccacccgccttggcctcccaaagtgccaccgcatgagccaccgcatccggccgagtcttaattcttgaaagagtaactctttacttttcagtaccacatagtccttaacggtaaggtttaggcatctactctaacaaaattgtcaaggcatcatcttcttccttgttctgcttgcttttttggtaacattcacccttgtccaagccctttggtaaaatcttcctccttctccttccatagctcctggagccctgctgacttccctctcctacctccttgttggcttcctcttgggccccttctctgtctgctcttccttctcaaggctgcacacccctgtggtccctggttcagctgagccttcgtgcttgtggcagtcttgactgtgtgcttgcacaccagccttagctgtctgacagctggctagccacagacatcctaaactcataaacttgtgactctctgattctccatctcagtctctttctcatgatcatagtcatttaggccaagacctccattgctttaagaagtttttatccccggtcgagtaagagtcactctagccttctttccaatgtgcacgtgtgtgcacgttcactcactgattgccagttcccaccagctgtatctctggaatgctttgcccaggttcacactttgtctcccctgcactattatgatagcttcattaattagtttgtttgcctcgaatctcttatttcctctgccctcctccaaaatggccactggagtctgggattcagctcacaggtctgataatatcatgcccatcctcactgcccttgtcttgcccatcgaataaagtgccagtgcagctgatcacttgggtcccttcagagttatggctgacatcacttattgagtgccattctaggctagatgtgtgtcacaactatcccacatagtttatttgaacctcacagcaaccttgcagggtggatagcagtttgtccattttgcagatgagagagctgactcagagatgaggaggcctagaccttgcctctgtcctcccttagggacccctttacattttagtccatactgtgctattgtcctgggaagggatgtctcccccttcccagccagtaataatcctccttagcctttacagtgcaggcaagggatactgctttctccatgaagctctccctgaaagccggtagttcttaacttttccttctatcagattgcaatctgcagctctttcctggtcacagggtcatctgcctcagggattattttatgatcaactctttgcacgtctgccttctgtgaactgtttactcttttggggcatggggtgtctgttcccacttgtttgtatgtcacttctagtgtacctgtgctgtgcatgtcatagggatgcaggaaggctgaagcaacttgaagggaatttacccaaaagaaagtgaacaggagtactgtgtggaattctgcatagcaaaacatagttttgttgacatgaggcactttgatgtctgtgcttattcttctcaattttgaggttaatatataacatccctgtattttgtggttaaatccagtttactcttttaaaagtacccctcagagccccttcacttagcgtttgatgccattcgttagcacagctcctgggctcctgggtttcctggagcaggatgggcatgttttgtaaaggtacatagggaaataaagacaagctttgtagttatgtagccaggcctcagggaaatgagtagaggtggggaatggaaagggcacccagattcaaataatggagcactccacccgacgggatatccatgccccctctgcagtgggcaccagctgcttcccatctggtgctcacttgcctgcctgcatggtcacttagctcttctcagtctcagcttctctttgtaccttagggtcacattccccaagagaggatctttggtggcgtttccttcccccatcattggctggagccctcaagacaggtctccttgtgggctgcaagtggtggtcaagtaccattaaataggatgtggacacctgtttggcagaaactgccaagagacacttctcccaacagggtactgcacgagtgttggggaagtacatgattgatggcctaccccatacaaagcctcgcactcactactgtagggcgtgtaaagatggagaagacactatccctgccatcaagtggcctaaaaccagtaacaatggggccggaaacacacctactgttcacagaaggaaaagtttcctatcaaatgatcatatctgtgttttccagatagagttacccaccaacctcatctaacctgtactgaacttgagtcacacctttgacctaatttttgcttaaatgaaatacagaggataggaataatataaataatactaaagctacatgttaactcagatgctatgctgaatgcagttttgaaatctaacctttattatttttattaaaactttagtaaagacactgtcattgaaatgtgattccccacaattacagttagaaaaatgtgaatttaaaaaatgtattttgcaacccataatctgtattgcacatatataatcttgctactcacctgtctttggcaagttttatattattttttctttccatgaatcgctacgaacctttttttctaagagaaatgaagaattaatttttttctttttagaaattccgggatttctttaatcaaaatgaaaccagtgatccagcaagggatacatgtgtgatccttacagtggaagggagaacatttccggtggatatcttttatctacaaaggtttgatgatgcttgaattctggatgatggtgtttagaaaactcagcctctgatgtagaatgtcagaactgcatttgctcacaactctaaaggatggggaggagcatgttttgtgtccctagtcattggtctagaatgttcttaccctgctccggatcactgctgaatttagtttaaactgttcacactgacatgcaagtttccgtaagtctgtggccagtagctcagccagagagagcaaaagtggtgaaaggttttggggagggaagcttgatagttttcagaactggggtttacaaggctgcctgtcagcaggggcagtattggtgatttgaatcatttggctctcagttctctacatccctagcgagaaggcccagttggcatttttaggagtagcctacttggacaaggaaggggccatcctaattcctgtactagtcactggacaaaaaaagaccaggagcctgttccagtggctgataaatccagagtcgtggacttgatttctgaatcgttttgttggagagctcatccatcagggccatccagccgacccatagatgctgctattggttaggagggaaaatgggctgggaagagcgtgggcttcagcactgggaccacagcttccgattttcactggtctgatgtctttgcatactaaagatagcacatctatttgtatgggtatatcatgttatttctttccaaataaagctaaaaatcatagttgacatataattatggattattcttgaatattagatttgaaaaaaatgaatatttattttgtttatcctgtactaattacctactgggcaggcccaaactcactttgatgagctttgctgccagattattagggtaattgatctgtaattaatgagcatattctagtgatgaattcatcccatttgtcttttcagtcctgttccagattatatcaaatcaactgtcgaaactgtggtgaaaattcaccagacagagggagacggagacgttttagcatttcttactggccaggtaatgccactgtacttctctgatgaatagacatgttaagacagcaccaaaagtaatacagagccttgttactttactcagtcatgtatttcatgttttgttgtattttgtggttccataattgtgtagaaaattgatttgatgtcattcatctaccatctagattgtcagggactcgttagcccctgcctgttctgtctgcagagggttaaatgtttttttaaatgtattagctgattccaaaataaactaggtagttgagtgagggctattttgtttgccagaattggatactacattaggtccatgtcctgcacacatgttgctgctgtgtacctctttttccagtgacacctttacagctcatcctggaggtgataagtggccatattactggtaaaacaactgaacagacccaagtgctcgctgacggtggccagcactattcagacctgccctccaactgtaatcttttccactgccaaacactttccatggttcagtaatcttttttggagaaagcttacagtgattttatatgctgcaacttgtctatatgcatgagatgcttgtttgacaccgtatatgtatgctgagtaaaatagtcatcgtttttatttattgggaactcttccattcattgcagatcataccgagtttttagtaactaatagtgtagttgcaaaatttcacccattgtcatcattgtgtattagcatttaattaaataccatcccagagtggaacatgacggcactgaaattcttgaatctgaccaaaattaaagtccagatcccaacttttattttctttcagtatgataaaatagcatgctttaaattgatctcggtttctttggttcctggttcaacgtctttaggaagaggtagaaactgttgtgtcgatgctcatcgagcaggctcgagcactagctcgcactgggatgaagagacacctccgagttctccccatgtatgcaggactgccttcctttgagcaaatgaaagtgtttgaaagggtgtcacgcagtgtcagaaaggtgagactatcctgatgaccaagggtgttggcagccgtctataatcataatgatgctcctttacttgttttgaaacttgctaaacacaaggcagacttctaggtccatatttctgtgtagtagatctaaaagcacacaataaataatacattgtgaagatttcttttttttttgagatggagtctcgctctgttgcccaggctggagtgcagtggcgcgatctcagctcactgcaagctctgcctcccgggttcacgccattctcctgcctcagcctcctgagtagctgggactacaggcgcccgccaccacacccggctaatttttttttgtatttttagtagagacggggtttcactaagttagccaggatggtctcgatctcctgaccttgtgatccgcccaccttggcctcccaaagtgctgggattacaggcgtcagccaccgtgcccggcctgttgtgaagattctaaacctgtcccactgaaggatcactttgacagtagttatcagatcaggtgacttctcttttcttctcttctgccttcctaatatttcccacgacacatgcttactttggcttaagggattgtttagggggattgaggtcagtcaggagcaatagaaaaattggtacacatggtttctaaataatttgttttaagtatcagcttgcctattttaaagggccaagtttaaatcaattaattcaaggtgtggcttaaaaatgtttagccttgaagtgagagtgaggaagggtgtggtggaaagcattggtttgaaggagctggcaggcagccagtccacctgggcctgactctgccttttcctttcattagatgaggactgcacagaaccagcccgaggacagcttttactgtagtagctatttatcaacagatggcagagaatagagcaggtgagggatggtctgaggatccactcccaatttcagaccacctggaagagggtgctcagccccttgaccattgggatggagcaacatgagtctgccctgtcaaacattaattgcagccagccaatcaggagacctggattctgcccctgagctactatgtgccttgggacaactgacttaacctcgaatctgagtttttgcagctgtaaaacgtaaataataataactttcagataggtggttttatagcataacatcttaatcccaactacataaaaatattagaaagattattttataaaatgatcatttataaaataatttttataaaatgatttataaaatgtaaagtgcctgaaaaaagttctaactgctatatatatgtgtcccctgctacttaaacccttcaggggcagctcccaatgtactgggaataaaattcaaatacctcatggtggcccagagaccacatatgattgcatatctgcctccctctgcaacctcatcttgtactttgtattttggctgcactggctgtttctccttcctttgaactgtttcttattcttggatctctatagggttggctgctgcttgttactcaggtctctgctcaaaatctttcacagaggctctgcctggccaacaaaagtaaagtagcatgccctattattacaataatatataatatacatgttatatactacatcatatcatattgcctcattgtgttaatattttctttatagtatttgttgttctctgaaattatcttcttgtttatgttcagcatgtcttcaccctaaacactcaaactagaatgtaaactctggcagagcaggggccttgtctgtcttgtttatcctacatcccagcaccttgaacagtgcttggcaaagtgcacaccctcagaaagtaatcatgatatgaatgaataaatgactatacctgcgcaagatggagggtgatttactttggttatgccaaagggaaaaactaacaaatgctaggctctgatcactttatatattaattgtatatagtcccttcagtagccctaggggaggtggtaaatcttattatgtagatgaggaaacaggttcaggaggttgagtaacttgtccagggtcacatgattagggagaattcaaacccagggcaccccctgacttggaaactcacagtctttctagtatattaaactgcctctcacagattctgcaatgttggaaatgttaaatcttttaggatttttacgagtttgttaaaagcaaaaagaataaaatgagttttattcttctttctgtggggaacgtaggtgatagtggccaccaatgtggcagaaacctctatcacaatcagcggcattgtgtatgtgatcgactgtggctttgtgaaactccgagcctacaatcccaggacagctattgaatgcttggtggtggtgccagtctcccaggcatcagctaatcagcgagcaggacgtggtggtcgtagtcgctcgggaaaatgttatcgcctttatacaggttagtgtggctttccctaagggtttttgactttcttatagtcagcctgggcaacagagtgtagcaaatgtttactcctaatggtagaacttaacataaaatacaggccttcctcacaaggccctgtgtaatcagatccccactgctttcctcactctaaatatggtgtttctttgttactagtccccattggccaaagctggcctgtgagtgactgcttatttgctatcctgttctaacctaacatctgggcacaggcctgtgtagccatttgtccctagggtgtgggctgtgtgtcctggagcctgtctttcttgcctttctttcttgacttaatgtgctgtttttgtattccaagatccctgagtcttgcggagcctcacattgggttccccttttacttctggttcagagcatctttgccaagtgaaaatggaaggtctgtccggagactcattcatagaaaacaaatagttggtgagctcctcctctgtgctgtgcatcatgctaggctctgagggaacagaaggcaattttaatactgtctcagcctttctggagctttctatccagcttgaagacagccttacctatagacagtgatggacccagagctgctctttctctgcacttctcttctgtggggaatgctgctgacattttccccagttgtccagactcaatttccaagtcattgttaattctcttctttatccagtatccatctgcattcacttaaccaggcccagggttttttattttgttttgtttcttctggtgtggctgcccctaaagaaggtccaggggttttagctctgccatttgtctcttcttttcctttctggttattattgtccttgttcagtctttgatgttgatctttcttttagcagatgtttgcagagcacctgctgtatgctggccacggtgctagagcttggagatctggggctagtaaccatggtctgtggccacagtgactgacagtctggtggtggaggtagacctcaaaacagatcagcatattatggtatgatagggagccataaagaatcgggagccttggaagcagagagcagaggcttttccttgggctgttttccctgcccagcagatcttccttatctttcaaatcctctctcagatggcagttccctcatgaagctaccttagatgccttctcctagaagctggtgttatccttctggggatttggggagtacttcacaaccagggtgttgtttgagcctgatcttactggcaatacagtccttatctaggcgaagaggtgattggggagattcaatttcagcgcaccaggcagagggaatggaaggtacaagtacttgcagggaaggaagtgggtttggaacattcacagaagggagggaataggcagaacccagggcctgaggaccaagggcaaccactgaagatgctaagaaggaatgactagagtggaaaagggagagccaggactgaaagggattctgacatgcagagaaggtttcaagacatttttctcttcaaaaattatttattggggtgaaatttacataacacaacattaaacacattaaagtgaacaatttattatattcacaatgttgtgtgaccactgcctccatctagtttcagaacatttcagccactccagaataaaatcccttatgctttaagcagtttctccccattctttctggctaccagtccctggaaatcaccaacctgtgttcttctcaatggatttctctcttttggatatttcatataaaaagtcatacaatatgtgaccttttgtgtctggcttcttttagcataatggttttgaggcttatctacattgtagcatgtacttcattcctttttattactgactaatattctgttgtatagataaaccacactttgtttattcatttattagttgtggacatttgggctgtttttgccttttggctattgtgaatagtgctggtatgaacctgcatgtacatgtacttgagtaggtgtttttaattcgttttggctattacagggttatatgtaattttgtttaacttttaaggagctcaagttacttttaaagaggccagcattatctcatgtgccaagaaatcatggactaaagataggcaggtggatttgggtgaaaagtcactgaatccctttgcatgagcagtttagtggaagtggggttggggagggcccctgactgtaatgagtgcattggtgtccagcctctaggcctccacaggagcctccagaaagtattgctttgaacagggtaccacctgctcagaccctccacattttctcaaaccatccaggatttttcctcagcttatcttctcctactaaccactacaaattgcttctcagctgaactactacacgacatgctctctgcatgagaaacgcttagataccttttccttgagctgtttcctctttgcccaacagatcctccttgtccttcaaatcctccctcaaatggcaacatgcagcttccctggaggccttcttccagccaccctgcttcctccttccctgagcctccatttctctttgggaggaccactccttgggacttttcctatttctccttgagggtcaactgtttctggtccaggtcccaggcccctgcatatcactgaagcttttcaaggggattggctgtgactcctacagcttctggccccatgcttcacacacttgagtcctcaggagagcttgcctgtcattgaacttttaggaaacacccacttcctgtgagcttttcagcagggtggtcctcttatgtgttaactttgtttctcctttggttagtagtgtgcttggaaaatggggttatcctatcaagaagctgtaccccaaattctcttgaaactaaaggaagtagctcatttggaacttcctgctgttggccgtcatccagaaccttctagttagacccaatttgtatcaattagtccacagaatattggttgtctgttttctcaaagaaaacctttctgaagtttttcggggatagtggtatttcttcatggcacttttttttttttcctctagttaactaaagctttatgatctaaatggaagttgggtcacccttgtattgtttaagaagggtgtacatcagttacaatgttgactgatgtgggaggttttggtgggtggagcattctctatataatccttaagctttctgaatatacatgaaaatgagttaatctcttcctcttttttccccacccttcctgcctagcttttataaaaaggccttcttccaaagtctcttctccttccccctccctttctgcccttcctgtcttgggatctctgtgtcttaggatgctttttcctgtgtaaggtcacctcttcttcctggtagggcatgtaaacattcatttcttggtttggggcagcattggattctgggaatgatattgtgtacctggcttgttgatttaaaaatttgatttggacaatttttgctctttataagatttggtcatttgttgtattttggtgatttatcttgaaattgttctttgcttgtatgtgaagctcttgcttccttgacttattccaaacagagatggtggcaactgggaactgatagtgattcagcaagtacttgttggtttgatttaatgttttgctgacaaaaaacattaaaaaacagaattttagataaagttttataaaggtgtattcaaatatatttatctaaggcattttaaaaatagaatggtctttcctaagtataaaaataactttatatcatggtatcatgtgcatctgcttctagaatcctagagacccttgttcaagatagagaagaaaatttgtcccttggcatagtgattgcatttgattgtgacatttggtcccaaacagttctgatttcctatcctcagaggaagcctttgacaagttgcctcagtctacggttcctgagatgcagcgtagtaatttggcacctgtcatcctgcagctgaaagcactaggaattgacaatgtcctcaggttccacttcatgtcggtaagtcctgcctgctgtctggggccatagggaggctagggagctcacagggggatgtcaggacattgtcgtagggcatgccatctttcctttttttccctactcaggtcatgtgttgtgtgtctgctttgcaaccaggccctgtgcaggacgtaggggaaaacagccagacaaggtagcctcaattcctattcttacatagttcctgttcttgtctgctggggaatagagacaagtaagtgggtaattacagagcagtgtgcccagggctctgagagacaaaggaagggcctcccaggtgaaacctgaaacccaaatagaatctcaccaggttaggagtggagagttccaggacagctagtctttgtagaggcctagatgcaggagtaccatgattgggggatccttcctgcagctttagatagagctgcaggaagacccttgtgcctgattgcttcctgagatgatttctaggagtagaatgactgggtcaaagggccgttgtcctgtttagggtcctgttacatggccagattgctttaccaatgtcaactctagcagtgcctgaatgcccaccttgtggtacttccattgtgccatgttatcttctttgggtttgctgatttgattggccagagagaggaaatcacctttattataattatttttaaatttttcataagatagatttttataaaaacatttattagtcagtttttatttcttctgagttgttaagctatttatctgttagaatttgtgtcagttagtgattttcaagagtcctttgaatattaaagacattaatttttataatatttcttacaaatattttctatttatattttactgttttttttttaatgtgtggacattctaaacatattcacagtaatctatttttgcctttatgatttctttggctattctttttttctttctttattttctgagacagtctcactctgtagcccaggctggagtgcagtggtgccatcttggctcactgcaacctctgcctcccaggctcaagtgattcttgtgcttcagcctcttgagtggctgggattacaggtgtgtgccaccacgcctggctaattttttatatttttagtagagacaaggttttgccttgttgaccaggctggtctcaaactcctgagcaggtcaggtgatccaccccgtctgggcctcccgaagtgctaggattataggcgtgagccaccacccccggcctctttggttattcttgcccttatgaagtacttcttatatttgggtcagttaatacatattctctcatattttcttctagaatttttatgatttgagaactttgttttttcccaactgtatatgatatgacaagtctggaaagtctggattcttggatagtaaagtccctaatgtcatatgtgatggtaaactaggtgaatgaaagaatagaacatacaaatatcaactcccccaaagaaaattgtgtacttaccataagtatagggaaaatggaccctttgattattggtgtagagtagaagatattataaagaaaagataaacaggctgagcgtggtggcttatgcctgtaatcccagcactttgggaggccgaggcaggtggatcacttgaggtccggacttcaagaccagcctggccaacatggtgaaaccccgtctctactaaaaatacaaaaattagccaggcatggtggcatgcgcctgtagtcccagctacttgggaggcttgaggcaggagaaacgcttgaacccgggaggtggaggttgcagtgagctgagattgtgccactgcactccagcctgggcaatagggtgagactctttcttaaaaaaaaagaaaagataaacagtatgtgctgatttgaaagcttatgaaaagccccgcatgtaaaattaaagaaaaacatacagtgacagaaatgacagatcagtatctcaaaaaatatgaagagtttttatatgcacatcatttacagtaaatattcactaaataaagctaaaggaaaaaaacagcacaaattcaaatttcaactatcattaggacatgttgagcttctctaggagagaggtgactgcacgttgatatagctataaaggatgactttacactaattttttttttttttgagacagagtctctctctgtcacccaggctggagtgcagttgtgcgatctcagctcattgcaacctctgcctcttgggttcaagtgattctcgtatctcagcctcccaagtagctgggactacaggaaagagccaccatgctcggttaattttttgtatttttagtagagacggggttttgccatgttggccaggatggtcttgaacgcctgacctcaggtgatctgcccaccttggcctcccaaagtgctgggattacaggtgtgagccactgtgcgcagttgactttacactaattaaatgattgagtataaacaaaaatggtgaaatcgaaaactgccacaatttgggaaagtaaattcctcccatgttataccgtttctgtccccatggaggactttctgacaacatttaatgagccgtagaaatgtctgctatttcttctcataaaaatttctcctgaaaaaataattcagaagaagaaaaaaagcttacatatgtgataatgcttatagcatttatattacatttaaaaatataaataatgaaaattatcgtaaaacttttggacagttgaaaaatgaaaaaaaaaatacaaatttatcttcacatatttccttctggttattatcccctgaaattgtggtttttatgattgaaattacagagtacatataattttgtatatttagcaatgttatttacaatggtgaaaaactggaacaatttaattgcccagcaataagaaaattgacttttttatggagtatgattgtcatagagtattatgcagccatcccaagtagttactgtgaagtttgtatgggtgcaagaaacaatgaaaacagaaaaacatgtagtgagaagaccacactaaaactatacataaacagtaattccagatatgttaaaacagtgtttctgtattatcccaaatcagttgaggtcacagagaaatactagtgaatgtgattagatgaaaatactatggataagatttttgtggagagggggataagttttttttgttaattgactggaaatcgggccaggaattgagtcagagctgaccttgttagctttttctgtaattgttaaaagcctagttcagagattgctattcctgttacctcatccactctcagtataaaagatcccacagggtttaagctccttcatttaagtgttgcccattttgcttctttgtagagaaagatgttgtaagcaccaaggaagggctagtggatcatttacatgatttgctcaatggtgatttgttgaatcctctctgtgtaatgaatccaataggtttagttcctgccctcgtgtgttcacctgtgtgtacggtcactacaacttttaaaaaagtttaactttggtctttggcaaacaaagtagggaaggtagactgggaaaaatgaggcctgagttcagctttgccaccaactgcctatatgaccttgttcagctgtcttttccttattgcagttcagtttcctcatctgtaaaactgagctaaaacaatgtgatgaataaaatacatttgttatgtgaatgcatttagaaaaaaatgctatgtgaatttagaaaaaatgcatttagaaaacatcctatgcagtttaaaaatgtactgtaattttattacctgggttattagaaaccacataatttagagagaaaaaatatgatgcctggcacttaggtgctcagtcaagatttgtagaaggaaaggaggtaaagatctggaaaatcagactgaggctcactacatcagctttgcttatgaactttaaggtctctagagctattattttttgaaattcagattcgacatatgttgtagtttccagacagggattaagaaaaaacaaattcagcgtatgttatttacccaccacggggcctggagtgggtctatgggggatgcaaagataaatcatccccgagccctgagtgctgcagtgtcctggggccccggtgtggtagaaggttgagtctgtgaagtaaaaattagaaatgtctcaggagggtttaaggaaaatgaagaggtagtttaagatagggacctatcacgtctgatggaggggaggatgagggagcacttcaaagggaaatgtttcatcaagctgagccttaaaggccaagcagtacaagggtgcctagaaggacaggaaggacatttcaagaggtgccaacagcaagaacagaaacatggaggctgggaagaatggggcatgttagaggggagaatggatttgaaaaggaaacagccacattttaatgtttgttgcccaaataaattgattcaggaagatttttatgttttttccagccccctccagcacagtcgatggttcaagccttggagttactgtatgctctgggaggtatgccagtttctctcatcattctctcttattatgtgttgtcttttgtgatattagtgaggtcatattcactttagggattttagtatcttcaggaatgggattggttctccccatatatataatccccctaatgatactttattgaaataggaagttgggaccataattagacacatgaaagctaattatgacagccagtatataaaacatgccagttcgtcagaagctattagtaagaatcaccagggctacactcctaagagatgtctagagatcagcagttccctaccaggatgtcagatcttacctccccagaccttttttctccacccaacaaccacatccttaaaaatcgtggctcagtattctctccctaaatcctcttcatttcattcctggagttgcttgtggagaattggggacattatcagcttctaacaccatgttacgggggaacttctattcagttgtcgattgaagatgttattaggttggtgcaaaaataattgtggtttttgccattgaaagtaatggcaaaacccgcaattgcttttgtcccaaccttaatagcgtttatcttgacatagagaaaatcatagtctgaattcaccgctttggggagtactgtttcttctgtgattggtaccacaaatgaatataatttccaattttgaattaagttttagtggagattttgctttttgagatttattttgagtgttactttttttttaagtagctgtattgaagtatagtttatgtactatacaattcactcgtttacagtgtacaaattcagaggcttttagcatattttcagggttgtgcaaccatcaccacagtctaattgtagagcatattcatcacccaaaaaagaaatctttacccattagcgccgaacttctcattctctttccccctagtcccccagcccaaggcaaccactctctggttcagtctctatagagagtttttatctctataggtgtgccttttctggacatttcatgtaaatggaattgtataatatgtggtcttttgtgattggcttctgtttcagtctgtctgctgttgctataacagaatgccagaggctgggtaatttctaaagaggtttatttgggtcacgattcaggtggctgaaagctccaagattaggcagctgtatttgaggagggcctcagcctgcttccactcaaggtggaaagcaaaaggagagtgggcgggtgcagagatcacatggcaagagaggaagccaggaagagaaacagaggaagccaggctcttttaagaacctgctgtcatgggaactaatccattactcaccctgggtaagggcattaatctgttcatgagggatcaccctcatgacccatacacttcccagtaggccccatctcccaacactgtcacgttggggatcaaatttcaacatgagctttggtggggacaaactacatccaaaccatagcagcttctttcatttagtatcatgtttcacaggttccttcatgttgtaacgtatattcataccttatccccttttatcactgaataatattctgttgtatggatataccacatattttttatccattcattagttgatagacatttgggttgtttccactttttggctgatataaataatgctgctataaatattagcatataaatgtggttttggtggacattcccaccagcaatgtatgagagttccagtttttccacattgttgccaatgcttgtaattgtcttttgtgttatagccatcctagtgggtgtgaaatggtatctcttggttttgatttgcgtttccctgatgagtcatgatgttgagcaccttttcgtgtgcttgctgcccatttgtaaatcttctttggagaaaagtctgttcaaatcctttgcccatttttatgtgtgctgttgtctttttttttttttttttttaaattgagttgaagttcttcatacattctgggcacatattcttatcagatatgtggtttgtaaatatttctcccatttttgtgttttggctttttacttacatgtacttactttttacttattagtattgtttgcagtacaaaaattttaagtttttgtgtggttccatttatctgtatttttcttttgttacgtgtgcccttggtgtcatgtctaagaaacttgcctaacttgtagtcattaagatattctcctaggttttatagttttggcccttacattaggtctgatccattttaagttacttttttggtatggagtgaggtaggggtccatcttcattcattatgttgattttacttctctgtgaatagccaattactgatttaaaagatctccagtgatttaaaagaccttcagctggatttacataagatcagcctggagtgaatgtgtgttggagaaggtttccacccccttcttctcaagcatgtaatgggaactcgaaagcacatttcctgggctgatctgtagtgaggatgagagaatgttgacagcataggagtttttatttgggctggtttttctccagtcaaacagaatgaaatttaagatatttcctatttcttcaataccctaaataagctggaaaagatagagggaccccccgcctccccccgccagcttcatttgatttcaagctgaattaccacctttaaagagatgtcttactgagctctgccttactgtgagatcttgcagcgtttaagtagtaaaacagtagtctatatcttgggaatccaatacctggatattggcaaggtattgccaatagagggcaagaagggcaggtggggagttgaaagagtcagcccagttcagcaaaatgttcaggaggcagttgcatgaacagggctggtgttggcaccagagggatctgggttagtgtttagattccaagttgctggccctgtagttgctcattgttgttctcattgtggctaataaagagatactcaagaccgggtaatttataaaggaaaggtttaatggactcacagttccacatggctggggaggcctcacagtcatggaagagcaaaggcatgtcttatatggcagcaggcaagagaacttgtgcaggggaactcccatttacaaagctatcagatcttgtgagacttattatcacgataacagtatgggggagactgcccctgtgattcagttacctccactcggccccgcccttgacatgtttacaattcaaggtgagatttgggtgggaacacagccaaaccatatcactcatttagtatgagaagggcacaggacacgggatgccatcgataccatcctggcacatctgtggcctgtccggtcctggaggtggtagaaagtccagacagtgagggggcaatggagatggcagagaaccaggagagttgggggccgggagctggcgaagagtagttccaagaagcagcggccagcagagccgagtgctgctgaggccatcaggaagatgccttgcgtttggtgctacccagttgttaggttcttgggaagagtggtctcttcggagtagtgggaacaggtgaggctcttgtggattgaggagagggtacaagcaggagaaggctgcagggggatttccttataattaagtccttgaatagaagtctttagaagtatcagttttttaaaaaattgggtattcaagagctcagtggagatcttttcttcttttaaggtaatggcactctagtgtcaaatggagtttggtgtagtgcatgaatcatcttttggatactttcttctttttagcatacattatcttttattctctcagcaactgtgtgccttccaacacaatggtacctgccttctgatttcttttgttgttcttatggcaggtctggacaaagactgtcgcctaactgaaccgcttggcatgagaattgcagagtttcctttgaatcccatgtttgccaaaatgctgcttgaatcaggtgggtagagcctgatagcttgaattgattttattttgactgtcagaggtgttgtttgcctgaattctgagcaccctggggaagagggtacaatatggtaaagaagtatatatatatctgtaacataacatttattgttttaaccattttatgtgtgtagttctgtgatacaaagtacgttcacattgttgtgcaaccatcagcaccatccatttctagaactttttccatcttttccattgaaactccatacttggtaaacacaaattccttattctctcctctgccccgcccctggcaaccaccactactttctgtctctatgaatttgactgctctgagaaccctcagaagtgcaatcacacagtatttgtccttgtgactctcttgtttctgttagcataatgtcttccaggttcatccatgttgtagtatgtgttaaaattttcttcatttttaaggcggaatagtattttattgtatatctataccatgttttgtttgtttatctgttgacagacactttggttgcttctaacttttggctattgtgaataatgctgctatgaacatggatacacaaatatcattttgagtccctgcttttatgtttattgggtatatagccagaagtggaattactaaatcatgataattctttaatttttaaaaatgtatttttaattgacaaataataattgtatatatttatgagatagagtgtgatgttttaatctatgtacacattgtagattcagtcaagcaaattaacatattcaccaactcaccaacttatcattttttttgtgctaagaatttgtgctaagaatgttaaaattctattctcttagcaattttgaaatatacgatacattattattaactgtggtcaccatgcagtgcaatagatcactaaaacctattcctccagtctaactgaaactttgtaccctttgatcaacacctcctctttctccattcaccccctgacccaggggatctcccagcctctggtaaccacctttctactctctgtttctatgagattgacttttttagattccatatatgagtgagatcatatggtgtttgtctttctgtgcctgccttatttcacttggcataatgtcctccagttccatttatgctgtcatgaatgacagtgttctcttcttttttaaggctgcatgttatttcattgtgtgtgtacatatttatataaaccacattttctttcttcattcatccagtgaatggacacttggattgcttccaaattgtggctgttgtaaataatgctgaaatgaatatgggaatgcagatatctccttgaaataccagtttcagttcctttgcatatatacctagaagtgtgattgtcagagcatataagtccatttttagttttttgaggtagtgccctactattttccattaataggtgtaccattttgcatttctgccagcagtacacgagggttccaatttctttgacttcttcagatttttgtgaggacatgggttctaggttaaaagatctggaagtcttctcgtaattagaaatcaaagtcatctagaaagtataatttgtttttttacctctgggaaagacagtttaattttttcttggttttgtctaacttttatgtcaactagcaatttatgaagatgtactttagacccagtatggggaaagctaactaattatgttttggaacaaccacttgttctcagccttccatttagaaacaggattcttttttttttttttttttttgagacagtgtctcactctgtcgcctagactagagtgcagtggcgcaatctcagctcactacaacctctgcctcctgggttcagttcaagcaattcttgtgcctcagcctcctgagtagctgggattacaggcatgtgccaccatgcccagctaattttgtatttttagtagagatggggtttcactatgttggccaggctggttttgaactcctgacctcaggtcatctgcccgccttggcctcccaaagtgctgggattacaggtgtgagctaccacacctggccgagaaacaggattctaagtgtggactggggaagtgcatcattcatgagatgggaggtagtggggagatgggacgagcagtgtagtgtactctgccttgtgccctggagtggtgattgctggtgactgtttccaggcgttccagcagcccccagcgtgctttgctggtctagttgtgccttgggcttcccagctgagatgaacccttttgagaaggaagccacttcatagaaggggtcaggagcagagaaacagcagaaggggcacaagccgctcattccctgtcccctctcggacttcctgccaggattccagatgttcccacaggagggtagggagcaggtgcggagctgacctgcccttagtgatggggccagtcttgaccttggcttatagtcagagtcccctatatttcagctgcagagggcagtaacacctccttttttggagtccttcaaggctactattcatctgggttacatatgggacttcacatttggctgagtgaaatatttttattttataaacttcatttttttgtttttatttttctgagagagggtcttgtgctgtcaccctggctggaatgcagtggcgtgaacttggctcactgcagccttgacctcccagctttaagcaatcctcctgagtagctggaccacaggcacataccaccatgcctggctaattgtttaattttttgtagagatggggttttgccatgctgcccaggcttatatactatacactttaaaaattaagctctagaaaaaatatgatcttagtcttcagtgtggtgcaaggaaagtatcagaaaatgtctttcacttcttgttggcacattatatggttgaaaccaaacatgctttttgttttacaggaaacttcggctgttctcaggaaattctaagcatcgctgccatgatgcagatccagaatatctttgtggtccccccaaaccagaagtctcacgcagtaagtcagctctgtccccaggctgtctgtaccagtctcttttgctttgagctttcgttgtcaaaactgtactcaggaactgctgaagacagagctgtacaaatgtgatctgctcatgttttgagtgtttattccgtgcttgatgttgtgtcaggtgttttgcaggcatcattccactttatcttcattataagcctgggaagtagatattattatcatattttatttatttatttatttattgagaggaagtctcgctctgttgctcaggctggaatgcagtggcgtgatctcagcccactgcaactgcactctgcctcccaggttcaagtgatgctcctgcctcccatgtagctaggattacaagcgtgctccaccacgcccggctaatttttgtatttttagtagagatggggtttcaccatattggccaggccggtctcgaactcctgacctcaggtgatccgcccttgacctcccaaagtgctggtattacaagcgtgagccaccgtgcccggcctattatcatattttaaagatggaggcatagagaggttaggtaactcattcacagttgcacagccagaattgttggctctggattcacagtccagagccccacaccttaaccattgaactaccaacttctagtttctgtcagggaaattgtcattcagactgctctgctagaaaccttggtgggcacattagtgacataagaagtcaggtgccagggtatagcaggctgattctgggcaccacacgacatcatggtcatgttgcaggtgggccattataagctagagagatccaatccccacctaaggtgcaggcatcagcaatgactaattgagtgaacactggaaagacggaaggacaagttttgatactgaagagatagatactcagaagtaaggtgtgttgatagaggtaggtcagagatgagttcaaagtcagttcctgtttgaaagtcagagaattagcagccttatgcatggaggggctgaatttgtatgtgtaatgaggaggagagagactttcttagggattgttgggatcctccttgtcagttgtataactatagattacaaagtttttctgcctctgtgcccagatgcttatgtctgtttttgtttagttttgtttttaattaacctggaggaggagagagacaagaacactaacattttatcaaatttctttgccagataccttgtaataaattatcttaatccacagcaatcttgataggtttagtttcctgattttacagataaggaaatcaaggctgagagaggttaagtaaccaagctgagttctttcaagatatggcagagctagaatgctgcaaactaggtctttctgaatccataacccacacgctattcaccatgcaatattacttccagtgcaaaagtcaatttctttctttctttctttttttcttttttgagacagggtctcgccctgttgccttggttggagcgcagtggtgcaaacatggctcctgggctcaagcgatccttccacctcagcctagtagctggggcttagaggcatacaccaccatgccctgctgatttttttttttagcttttgtagacatggggtttacctatgttgcccaggctggtctcgaacttctgggttcaggcaatcctcccaccttagcctcaccaaatgctgggattataggtgtgagccaccacacccagcaaagagtgaaattctgaatgttgcttcattctttccagattcgagtgcaccgtaaatttgctgtggaggagggcgaccacctcactatgctcaatatatatgaagcatttatcaaagtaagcacaactactgctcgaagtgccgcctcaacacaccaccctctggaggtgatctaggagggaggatcccagaagttcagttcgtaaaggaatgtccaagagagcccttgattttcctgttagatttattgccagtacttctaactggtgggtcgggctttctgcctgagtttgtggtgaggtattgctgagaagaacacaggaatcattcattgctttcccttgcttggagatatggtacactagtggcaggccagtggcccagcctcacgtcatctcacatccactgtgcagtagacagaaaggcaacatttgaataggaagttctgttacattttctgccaggtgaatgaggctgagagcaacttgtagtcctgggttgaatcttcaaagctgtcccagctgccatgagaagacatttagttgagatctgtgcatattcacatatcccacccatatttagctataagtgatgttaattttttattgttaatattctttaaaactaagcaaataatacagcttaaagttctcatgaaaaattgttaataaaggtgatgaaaatgatgaaaaaagtaaccttacataaaagaaagggtataatacttcagatttttaatactcatttcttaaatactcttttagaagtgaagaaatactaaatttttgtttaccagtgatttgaggaagattattcagttggtgaaaagttttcagaaaaaagaaattcactctttttgagacttacggcttaaatcagttaaaattcatttgtacaggcacaatgtatcatctgcagtctgaagctttctctaccactagaaagtgggtataggtctacattgtattattctatggttgccttcttggaatatcttctattaattacattttcttttttaaagcactttaacttacaatagaatttcagaggtacatttccacagcaataatttactctaagacataatgatcatacttatgaatgcagaaaaaattaaatactgttgatagaaaaatcatgctttggggacaaataatagtaatttgtaaattatttctacattggcaagtgtcatattgttggcttctagtataataaagtgatacattcaagcatgccaaagaagaaaagttgatttacaaagaaccacgtggagaaatggttctttctgatagttcacatctcatgaaggtatgtaagattgaaaccgtttctgcgtgtcattaagttctcatttgccctttagtgtaaagagtgaggttgcagagcagtcagatgtgtgcaaggttgttaacatctgttttgagagatggggcaaaaaagggccagttcccatctttagatcttatgccgttgaacagcacatgggggaagagagaagaatgatctttacaacatagccttagtcgagaacatatctgttttctaactccctctctctgggttgttctgtagcacaataaggactctaaatggtgtcaggaacatttcctgaattacaagggtcttgtcagagctgcgactgtaagagaacaattgaaaaagcttcttgtcaagtttcaagtgcccaggaagtctagtgaaggtgagaagaaaccgtcccagctggtgacctcccttgcttcattctgttgagttgtcttcctaaagttctcatgctgggctggtgcgaggcagtgtggcgtgctctgtaccaacactgggttttatattttgagttgcctgcatctgtgaaaagctgaaggtcaagttgcgtattttttccaaggaggtctatttttctttctgatgggcattcttactaaaggaatttcatagcccatgacaatacttaagaatcactaacagtcacatcagtgcacatcatgtcattgattttcccatgtaggctttgcaagaaaaattactttttgatcagtgatattagtagctattacataaaaattaaattttatattcaaagacaagtattattaaagcaagtgctggatatttagcctaggcagccactaaaggtaagacagaaaagtactatgtaagacgtagtctctggcctctagcagtgacagtgactactattaatcagggacacagtaggttacgctgtggcaggggttctccaaatattctcttgctcaatctcgcactctgtgaggtgtcggtaatgttatcctcattttacaattagtcgtaagatcctagggagaaggtagattaaattcaggaccacgcaactggtaaggaggagagccagatctgtatgtggctcagaagtctacgcttttaaggaagtgacacacccgcctcagcagtcagcctgaaagcctagtgtgccaggtactcagccacatcctcagcaccattagtacttggtaacatttcctgagtgcttataagtggctagacagtgcactgagtgttccatgtgtttattaatttaatgctcacaacaacgctgtgaaacgtgtgctcttttccccatcttataggtgagaaaagcgtggctaagaggtaaaatgtaacttgctgaagttacacagtgagggtatgatggagtcagaacctgagcccaggcggttccatttaagtcttcttttgtctttatactaagagcaagtgattaaacaatgacggagtcttggcttttactctaagggaacagtgtaatgaagggagagattcatatggatagacaaagtactaagattatcagtcctcttcgaagttaaagtagtagatactttagtaatcatagaagacgtgctggcagatgtggaaggaatgccgggaagaaggaatccagagagggctagcttgggaagtctttcagcttccttgaggtgtggtgggagtccggtcaagctttggggtctggttgaattagaaaatggtggcaaagagcactctagggaaggaggactggagacaagtgcttggagtgaggagtatatgagacgctcagagaatatttgatgggtgaatacactcacgagagagggaagagttgaaacctgggccattgagccatgttggagtcattgatagaaacaggatgcttacaaggagcacctagttggagagcagctcgtcaaacgcctgtcacccagcaggtagatgacagccttacttcagcaattggtgttcttcacctgtgtttcattatcagacccctgcccaggagaaaagttaaatttaaattctacccagcctgagaaattaaatactaaggaataagattttgtagggtaggattgagctttggagggctaccggccattgtagtgtctaagatgctcccctccccctgcctccaagaaccagtttccacccctttggaagtgatatcacccctgtttagagtgcatattttacatggaaatttcttatggacaataggagagaagagactggatatcggattagatcatatttagacatgtagatttgagattttatcagctcagtgcttaggaaaaatacagaaaatcatggagactaaataaattacatgcaaatttaaaacatctaagggttaaaaaatagaaagcaattagtgaaagatactttcagcagtcatgagataaatgataaagattaaaaactttattatagaatgattttatttaatatatttaggaaaaaacagttttcaggttgataaatgggctaaggattagaacaaaaaattcacaaaagaagaaatatgccgatagtaatcaaataaatgtaatataaaagaaggtaacagaaggtaacactttttgccaaaacattgctagtaagaatgcagtgaaactgccatttttatatattgttgatggctttggaaatagtaccacctttatggaacttacttaccaacatgctttattccattggatctaagataccatcatgtgtaagaaacatcgttattttatgtgtcaccaaagaaaaaaaatgctgccagttatcattgtaaaatgctgtcctaatttcagtgaattaaagttagaaaaagagcgagtcttaaaattgatgagatgtgatatgtcattaaccataaaaataacattagccttttgcacaacaatttggaatgtatcctatggacatcatctaatagtggggaagctttattcatggaagatgttagctgtagcaatagaaacaccagttaaaatggaacatttgaaaaatttgaagaattacttcaattttcaaacactagctcataaccacagaagtaacgttgtatactatctccagtttgtgttttatagaaagaacattgttgccatatgacactcttttacaaaggagttctgaggtcactgaccagcctgcagagcagcactcttaggttctggtgcccagccatggtccagtcatctgtggcttaggggaggttggaggggtcccaggttcaaggagcagaccagcattgttgtcagcagcagttgtggggagtgggacctccttagatggtgctggggcaggcatccagcattgggaagggtagggctggagccatttcaggagagggtttccaggtgtcttgaagcagcctggggtggtgctgggagtggatcctgtgcattagagcacacggagcctagggcaggcaagggtttcacccgcctctctgttggctgcctatgtaggtgacccggatctggttctgaggtgcattgtctccggcttcttcgccaatgcagcgaggtttcattctactggagcttataggtaacatgatacttggtgaagtcatttgttaaaggaacaatcttacaaatgacccaaaccccacagaaagctgtgcagagatagtaattgcataattatttgtaatttctaccatgtctccttccaaaactgagttgaggttagcgacatagctttaagcaaaatatcttgactttctaaaaatgattctcacatattcagctcatctatatgttgtatgttttagaaggatgacaattatacatcttgaggctggtaatatttcaattctaatgacagaataatatgacctgaagaaactattaaaaataatgtttctcagagaagttattttacaattggctagtttattatgtctttagagatctgcacgactgaagtcccctcccaccctggtatagtgtggccacgtctggtgtctttggaggtagccaggtgtttctcatgtgctggatgtgcctcctgctacataacctgattcttccagttccattttctaggcataggaaatcactcattgatgccttcctaatggtctttactatattcaaatgcagtgaaaactaagcatagcttaggcatactgtagcctgtcagtatcatgattctccaaactaatcattccagtgctttgaattgttacttttattctgtcttttctgtctttggctcattttagtttcataacctcagtgtagcctcctaaaagtgtagctatcatcattttctgttctttaataagagaacactccaaagaatttctccccagctcttctatgtattattttgtcattaattttttttcccagagaaaatattactgccctgttatcttgaggtcagccaagatatcccttgtcctgggctcctgttaatgagtccagagttgcactgagccttttttaattttgacagccagatctgctccatctagtatcctagtagccgactgttggaactgcaggatagcactttacaatgatctctagtatgttctctttgttactccaggcatgttgtagcctgtcagtattgtgattcatttgcccattgtatgagctcacctccccaccctgagttgtctgtatttgaggcaacttgtccatgtggaggcgacccccacggtggcccgagatcttccctaaggagtgctgccagcttgtcatcttgattgctcctactctcctggagagttagcaattttgactagcgtttggaaaattcttttatcagtgtccttagcaacaatgtgggctacctaagaggttccaggctaatcattcctttgagacaacatttagtgttgatcagctcaccaccccctggtaggacagcccaggaccccaggacgctggctttattacaatgccgacgaggcattccgtcacagcacttgaagcacttcccccaagaaacagatcattctactgagttggaattggaagtactatttcagagaaattaatagtccagtattgagcttttttttttttttttgagatggagtttcgctcttgttgcccatgctagagtgcaatggggtgatcttggctcatcgcaacctttgcctcccagtttcaagcgattctcctgcctcagcctccggagtagctgggattacaggcatgtgacaccacacccaactaattttgtatttttagtagagacagggtttctccatgttggccaggctggtcttgaactcccgacctcaagtgatctgctcgccttggcctcccaaagtgctgggattacaggcatgagccaccatgcctggctgtgagctttcttttttcattatcgttacgtccccctatagtcattatctttagtatttaactttgctttttagattatagaagaaatcacatgtattatttccattccaaaggaaattgttttgaaagagcacctgcagaagatacacataaacataggcagagcattttattcctaaatgttttttctaagtgtccgcgtgttgcttttctcctcttcgctttttccacgtgatttattcttgacttctggggtggcagccaggagagggatcaagaaaggttgcaagagaagatggagataattgttttgcttgtgacgagttcagtctgcatgcttttttggtaatattaaaaatatctgtgggaaagtcttgctataagtatttaaaatgtgcttcagacaaaattcttctatgttccaaggaccatccgtgatgaccatgagctgcacatacaccctgcgtcagtcctctatgcagagaagccgcctcgctggtaagctcatcctgctgcttagcctgtgcctgctttgaacagggccatgttcttgtttttctcctgtacatgtttcttgacatcgcctctagaattgctgctctgggccgggcgtggtggctcacgcctgtaatcccagcactttgggaggccaatgtaggcaggtcacctgaggtcaggagttcaagaccagcctggccaacatggtgaaacctcatctctactaaaaatacaaaaattagccaggcgtgatgggcacgtctgtaatctgagctactcgggaggctgaggcaggagaattgcttgaacctgggaggcagaggttgcagtgagctgagatcacaccactgcactctagcctgggtgacagagtgagattccatgtcaaaaaaaaaaaagagaatttctgctctggcaaagagcttcttaagcaaacagtgatatttgtctactcactcatccactcagcaaacgttcattttcaaccactgactggatgcttagccctgcatgaggcacagctatgcagagatgaattgggatcccagctcacggttcttttttttttttttttttgagacagagtttcgctctgtcgcccaggctggagtgcagtgacggcgctatcttggctcactgcaacctctgcctcccaggtccacgtgattctcctgcctcagccacctgagtagctgagactatagatgtgtgcaatcacgcctggctaatttttgtatttttagtggagatggggtttcactgtgttggccaggctggtctccaactcctgacctcaggtgatccacccacctcggcctcccaaagctctgggattacaggcatgagccactgtacccggccccagcccacagttttgacatagggacagacacagagtcaactaccttaggggaagggctttactagcagcatggatgaagtgctgggctcagcacatcatgtgccagtgagagtcagggcaggcttcatggaggagataacattcattctgaacctggaaacaagagtgttcagtcagaaaggacccggagggtattctaggtagagaagtagcaggggcagagccatggaacataaaggaacctcatgcgtttgggaagtggggaatcattggtatgggtggcccatgcaatggtgctgctctgtaacactgcctaggaagaaagaggtaagcacagaagtctagagtaggcctttagacatctttataacatttcaatggttaagtttatgtttgtccaatttaataataaaaattgggggcttatatttttcttgtttacaatttcatttttctagaattcatttatattgtattttaccaataaaaagtactgattaaaagtactgatcaaccatggattggattttgtttttttgagacagtgtctcactctgtgtttttgagacagtgtctcaatctgttgcccagtggtgtgatcttggctcacttcaatctccaccttcggggttcaagtgattctcctgcctcagcctcctgagtagctgggattacaggtgcatgcaaccatgcccagctaatttttgtatttttagtagagacggggttttgccgtgttggccaggctggtctcaaactcctgacctcaggtgatctgcccacctcagcctcccaaagtgctgggattacaggcgtgagccactgtgcctggcccagattggaaattttaaagacgacaacaacttgtccttctccaattggaagatggagaagccctgggaaaaagggtggggtgtgtgtgaagagagggagagaagatagcggtagatttgaaggcaagaaagtctgtggtcaaacactttgtaccctagaattgcagctttcaaaatgtggtctccagcccagcatcagtatcacctggaaacttgtacgaaatgcagcttctcaggccatgccaagtcccattcaatcagaaactggactagggcctaggactccattttaacaagccctccagatgtttcttttgggcagtaaagtttgagttctgtttccctagaccaaggaatcggatttatcctgtagccactgcagacctagaagttgcttaggttgaaagcaccttggtcggttctgggtttagaaatgttacccagtgaccacactaatgtggtcaggatacgcacactcgtgtgcaggataatttgaagagtgcccacgcctgtcatctcagcacttttgagaggctgaggccagaggattgcttgaggtcaggagttcaataccagcctgggtgccatagccagacctcaactctcaaaaaaaaaatgagccaggcatggtggcacgtggctgtagtactagctactcaggagactgagacaggaggatcgcttgagcccaggagattcaggcttcagtgagccatgattgcaccactgcactctagcctgggtgacagagcgagaccctgcctttaaaaaatttttttttttaaatcaagagagatgcaaaacctcaattttagatcctttttttgctgacttttgggtggttaaatttgggagttgcttaaaggagaaaggcttttctttttcttgcttcattcctaaggagctctgaagggcaaagaaaggttggggaaatagagccagcctgaagccatgccataccattcaggtggcaaagaaagtgccccccagtcacggcctctttgcagggggggcccttctttttcctttgatcagctgagattcacttactggtttttgaggggtggggaaccacagtatggctggtatgtttataacatgggaagccctgaattaacactttggatgtttcagaaactgatatctactcatatgcacacctaaaatcaggggactggatgttatgctcttggctcttcggttgtctattacctgagccttagaaacattttttcccttaaataaaggtataatttatttacagtgcaagatgagttttgacaaatgtgtatacccatgtaacctggacccacataaattatacaatattgttatcattttagaaaattcctttgtgtctctttacagtcagttcccagcctctttcagaatcaggcaagtctttgcctccatttctgcattttctaataaagtcattaggctcagttcagagttctgtaaatgcagatgaaggatccagaaaggtccttcgcggataactgagatgttccagaagtcattgaggatttagagtctcatctgaaaaatggacacaccattacccagcacttaggtcttgaggctgtggtgagcaacataaatgcatgtgtttagcacagtgtctggcacatagagtagaacctgttaaaggttaaaggaaacagcatgtctacctgtggttcctgactgtcatcacaagagggggaaattagctcatgtttctttctcatttcagggtcatctataacgaagttatacagacctccaagtactacatgagagatgtgactgccattgaatcggcctggctgttggagctggctccacacttttatcaacaaggaacggtaggaatgaactgagtctgtgccccagccacctgttcacagcctctccatgtttttaaatgtactttttttctccaatttaatgccctatgtgtgttccccctaggggtgcatagggtggaaaggccattaccatatccccaaaacattctgggaaagcactctagcgtttaattcatagtgaagtgcaattaaaaataaatccccctaatctcataagaaaaaaaaggtatcgctttctcgctttctttctccttttgctcttccaaactatttttttttttttttttgagacagtctcactctgccgcccaggctggagtgcagtggcacgatcatggctcactgcaagctccgtttcccggattcaagcaattctcctgccttagcccccatgtagctgggattacaggtgtgtgccaccacgtctggctcatttttttctttttcttttttcttttttttttttttgtatttttaatagagacaacggtttcaccatgttggccaggctggttacaaactcctggcctcaagtgatccacccacctcagcctcccaaagtgctgggattacaggtatgagccagcaggcctggcctgagctaattaaaaaaaatttttttagggatggggtttcactatgttgcccaggctagtctcgaataactgggctcaagtggtgctcctgccttggtctcccaaattgctgggattacaggtgtgagccaccatgccaccagttcgttttttatttttatttatttatttttgggacagagtcttgccctgtcatcctggctggaatgcagtggcacaatctcagctcactgcaacctctgcttcccaggttcaagtgatactcctgcctcagcctctctaatagctgggattacaggcgtgcgccaccatgcccggctaatttttgtatttttagtagagacagggttttgccatattggccaggctggtcttgaactcctgacctctggtgatccgcccgccttggtctcccaaagtgttgggattacaggtgtgagccaccacgcccagctccttttttaaaagggttacagccctgtgctgtttgtggcctgaaaatacttgctttacatattttgcccaagtttactgttgtttacagcagaagagaaagtctgaaacctttttctccattagggccagaattggactacacaatgtttccaaagcgatatttgaattgattgccacattgaaaaattgggagatttcatattaaacatgaatttctggtttctcttgaaagacatgtttagtctggcaacactaggcttgcgttcctacgtggtggcatcacaggggcttaggggtggctgcctgctgttagtgacatcgccaggtgccgtagtcccatgtcacttgcttacttgcctgctgcactcttggagacatttgaatttgtgaccctgtaaatggaaggatctcctcatctctcctgctccagcaaagtcaagggacattgccctctcaaaattttataatatttaatttttatgtaatcaaacaaaaaccatttcacacctttatagttcttcacacatcccaattcagatatttcagctggaaagcagatcagcctgcagggactgataaaaatgcagtgtgtgttgtctttgctgaattaggttgataagaataaacctggtgaaagaaaggcttttccttcaaaacctctcaggtggaaagcagcagacttcaggagtcaagagaagggatcagaaaggtaaactagaggttgaaagaggaatggtgcagtggtcaaaatgcctgttaaagtaagaagatgcagacagccagagaaggataagcctgaaattgtcttggattcatttagactcttggaaacagaattagcccagaagctgagtcattttcccttctcagctcaaaattccagtttctttaggtcaaacccacaaagttaaagagcaaatagcttcagaaatttgaagaaaataacaagcccaaatttcttcatttgtctcttctctccaaatggcttttttatttttaagctcatcacctccactgtcatcggagtatttttagagaggctgggacagacctttagaaatcacctagtgcggccgagcacggtggctcacgcctgtaatcccagcactttgggaggctgaggtgggtggaacacatgaggacaggagttcgagaccagcctggccaacatggtgaaaccccgtctctactaaaaatacaaaaattagccgggcatggtggcatgtgcctgtaatcccagctacttgggaggctgaggcaggagaatcacttgaacctaggaggtggaggctgcagtgagccgagatcacaccactgcactccagcctaggcgacagagcaagactgtccccccaaaaaaaaaaaaaaaaaaaaaaaaaagaaatcacctaatacaacaacctcattgtataacgatggtccccaaaccacagagaaacttgtgttgtttcttaactgtatagtccaagggcacttctactattaacttgtccaaagcagattgatttctcaaagaacctccagatctacaggggttgcccatgtatggtagatgttcctttactgaacacagtgcagcacctcacaaccttccacagcccacagatcattcacggctctgttcctggcacctttggagactttccatcaccactgtttttcggaatgttgctctcaccctgtgtggaggcctgaaatggttcagagtcagctttgtttatattcaacattcttcccagaaaaaagcaccaaaaatggccccacaggcacaatggcgtcatctcccatccccaagctaaggccgtggatatctaacattagctgtaggggttatatcaggtgacgtgtagagagagaattcagagaaattcagcaagacctacagctagacaggggaagaacggggtgacctattcagagatttgccttctggcttttaaattatttttccttattctcagagatatcttcattattagggaaaacccttttaacgaggcctttgcaagagcctgtagtagtcctccctcaggtgtaagcagatggaaagtctgagttcttgtagctcatttatacccgggtcctgttcgctctgttgtctctcacgtcatacctggtggtgcgctgtgtcttcgttcacgccctccattttttcagggcctgcagttctctctgggggcgatgcggcttgatgttgtggggccatgtggctgtgctaagtagtgggcacaccagctccggagcagtcagggtgggcattctcatgtgaggctcccactgtgtgttagttggcacggcttagggatctcttggttattgatgattagtaatgggctgtcgggtatatcccagttgatgagtggagggaggtctttcattaaaagcttgtatttacacactctgcctcaaaggcatatttaaggatttctgccacttttggctttgctttagaatgtaaaaaatacttcattttccaatcctattatctgatgcctatgattagaatattgtgcttcgtgttattcataatggtagaaagtgacatttctggggaaaaaaaaaagtgtcactaggaggtgtcctttctgttttcccagcaagcttgtaccctccatgtgggcagaggccatatctttatctccatccttgagcatgggtacctggtgtgttgagacgcttggtaaattgacttccttggtcctaaagagaggataatttttcttgactattgtcaggaacttcttggagatttgagatcacttccagactgagcccagtctcctgagcacagttgtctggctgcggtgctgtcctctaggctggggcagagggagagtcgtgtctcaaaaagaaaacctttccttgacagcttccgcagagccctgtataaccagcttcagccgctgtggcttgggcctcgggttgctggcggctgaattcaggtcggcttcttcattggccacttgggctttttccttccaggctgtttcatgaacagctcagcatttactgggaaggtgtggaccagatggaagatttgatgtggtcattcatatggggattatgttgcagtctggtttctttgtctaatcaaccccaactgtagtgtcttctcttctgttgcagcacctgtctctgaaagccaaaagggccaaggtccaggacccgtgagaggagcccacagctacagctgcagggactgctggcgtcctctcctccatgctgctgcccctggtcccaggtggggtgagctggcaccagctcctgtggaatgtttggttgctctgaagtgggctgcggcctgttcattagtcctttcttcccgctgcccacagcatttgcatccttgctgggatcctggaggactttgtgcatgggcaggcatccttctgtgctgcagcgggcagagtgggagttggctcactcagcacgctcactaacccagcatgccacttccagcaggcatgcagtcctggcccagctctatgggaaacaaggaggaaagttagccactgaaggccaaaacaccatgtggggtggacagagggtttgctgggctggctttgctttccctgctggggccacagctgtgttaaccaatgaggtctgctgccaggtgtgaacaagcatgtctctacgaatgaacgaaacattggggatctctgccgaaaccaccaaagggcatgtctgatgggcacagggtctcccaaacccagtggcttctgtctgtcctcagcccttgtccctgtttatctgcagccaggagacttgcaagggattggtgattgacagagaggactcgtgcgctgttttgtgttagcagaggatttgtgtttcacaggtaggcttagcgtcctctcagagtgtagtgccaggtcctggtgccacgctagctgagcactcaggagagttcatcagctcagatcccacagggcctcctctttagcaggaattcacaacagtttggatgccctaaacttctgtagctcaggaacatcactggtgtatttgtttttttgtttgtttgcttgggttcttgcaagagcgcgtggggacagttcttccagcaggcactggttttgttgccccagggctgctttgctgtgatgatgattgcatttcaacacatgccagatgcagattttttcccccttactgtttcaatgacctttattttaaaaacacatagcttgaaaatttatttttatactgatattagtttggatgtgccacttttggcaccaaacgtgtatgtcatttttatttccattttataaacatgtaaataatagtgataacttgttaataatagtaaacctttatacctaaagtaaatgtcttccctcccacacctggttttcgtgtctgtatgttaagatgttctaatgaattgttcgaagtgagggcctgacattagctaagaaacttaatgctgtggcatacagcagctttgggatctcagggacacaggaagccccctaaagcaagatgatgtgactgaatgacctcaagacctgattagagtaaactgtgggacatttaaaagaagtcccaaagaggtgctaattcttgccagtttccagttgggatcttcctgtagagaggtcagaaacattatttttcaagtttggctttaggactggggctgatcctaaaaagcttatatggcggtggaaggggaaaggtacaggtttcacaccctcgggttggagaccagagtccactgggagcccggacaatctggagggagcacccagaggcaagcccgtccctgcatgctgcctctacccctgggcgcctgatcctgagcacatgcttcccctctgtccctccacctctcagaaggcagccctccccaggcgacaccccccagtgttgtgtcctgtgttatgtcacagtctgtgatgggtgggacaggtccttgctgtccgaagcaactacaaaatcctgggcccatggggaggcccctttacagtagggttggttaaggctgggaccacacaactcaccagggagtggggcccggcctgggcgagagagatgagagcttttgactttgtctgttgcaggtctgtgtccctgttcccattgtcagcccacagatgtgacagcagggcctagtacctcacagactgtcccccagtacttccacagaattagtcccctcgggctccacacaggtcttcagatactgctagtaaaattccccacagcattgctgtgtcttccctttggagcaagtgagagggcagagagaagctggcgctggaaagcatggaggcggtggtgccctgtaggcccagagatggcagctttctgtgttggtggcttgcagagaccctgccagttttctgccatagctggcttccccgggggttggacattgtcgtcacagggagcccctggttcagccagtgcgctgctcagtccagccagcaaatgttgagccctcaggccatgtgcatggcacagggatgaggcggagacacttgacaacaagtaaccagatgagtggaccaggatggagctgggcgcacgagaaggacagggtggcaggagatggcagaggtccagtaggggttgttaaggccagggctgtatccacagagacttccccacgacaagatgctttcctggtgaaaggacagaccgctctcatgttcttccctggccatccccacattgctgagcatttcatgtgggccatgaacttggagagctgcctagtgccccagctccatgctcccatctccactgttttgtcctggtgtcagcacagcctactgccagtgctgctccagcttcatgggctgggccctgccattcagtgctgggttgtccccagcaccccagccctgccctcagctctgttttccagggcccggcgctgacagtgtggctgacatttctcctagcctgagcaagaatgtctgccgctgaccagacagagggttgggtggctgggggagggaggcgcaggccaaggggcctaaatctggaaaaccgcaagactccgtcctggagccacaagactggatgtctggcagtgaggcctgggaagctgtaagttgtaaaagccccatctcgggtggttctgatgaagtggtgggcttgggaatcctggggacaggagttgaagatgtgaagacatgcagcccaatggacagatagcccccagcggggagatcagagcttcgagatcagagcgtcaggtctgagtgaaagctgataaattgtttcttcacaagtgtgcttagaccccagcccaattccccttacgtgtttccccagaacacagatctgtggggttgggattcttccccaggcaggttgtggcagcaggcatcaatgtcagctcactatgaattttcctgagtcttgcaaaaatgaggaatgtgtagtaatgagcattttataaagcttaagtttattctctataaaagaccatcctttagtgttttttattttttatttttattttttgagtcagagtcttgctctgtcacccaggctagagtgcagtggcatgatctcggctcactgcaacctccgcttcccgggttcaagcgattctcctgcctcagtctcccaagtagctgggattacaggcacctgccaccacacccagctaatttttgtattttcagtggagacagggtttcattgtgttggccaggctggtctcaaactcctgacctcaagtgatctgcctgctttggcctcccaaagtgctgggattacaggcatgagccaccttgcccggccatcctttagtcttttcttggtgctaagatgcttttaggaaacaatggtgatagtagatggtggttttattttttaatgttttctttggaaaaataaaatgtcaacagtcgttcatctatcacccaattaaaaaccaattcaaaatgatgaaacaaaaactgatgtaatcctcaagtctgggaactactgggttgtggctgagtgggccgggcagggcatctggcagcatcagcaccaagatcatcattctgggaagtggatctgaactgccaagcacccacctgggtttcaagtgaactttggcgccgctggaggacatttctatcccctggaagaattcgagttggcaagtctcagccccatatccctttttcacctcaagataagatcaggtattttccactctccaatgattcatctgaattttctcctcagccttctaatttgtgatgaaacaggatgatggaactctggatttcttgtcagtttaatctgtttttttttttctttttttctgagtcattggaactggaaatagccaatcaaataattgcacaaacagctggctactgtggatgaccaggtggaatttgcgtggcagacggtctggagagggcttgtccctgggtcctcacagtcattgctccctccagcaagcaaggatgacacgttgacgtctctggtgaatcctggcagtgttcccttttgcactcttgggtggcattggacttgctggaacagggcgtctccttgcctgcttaagtgcggccaaagagattcccagcgcagcgttcccccaggccctctggcacacatggccaccgctcccacttgtgggttctcctgaaggcaatgagcaggctagggaggctgggaggttcacaagggaggggtggtgcaggcacaggatttaataccccaggatctccatagccaggtgaacgaccagcacaggctactgcccatggcttcttgaccatggcctcatcagtggctccaagtatgaacgtcctagccaggttctttgctggcctcagcctgatgggcggacccatataggacccaaaggtcgcctgagttcctttctgcgtccccaccactgccatcagcctctacatcgccctggaccccaggagagcaggagctggctgataaggccttaccagctcaccctcaggctgtttattttagcctcgttctctggttgcttttcttccccgcattttaggcttgttctgttttcaagtgcggtcttcagtttgcttggtgtctgctgtccctgtgttttccctttgctgttgtttttttgtttttcctcatgggtatgcctcacccctttaatctccacctctctgacctctgcattattttcctttttactgcgaagttttaaaaagaatgcagtcgtgtttatttttaatgctcttcaaaagtattttttcctcgacatttatgttaacgtcttggtcttttttgtactctgcttgtttgtctaactattattttggacatttgttgtcgtggttctataaatattttcttctgtgatcttcttttgtttctttttgttttgttttgatacagagtctcgctctgtcacccaggctggagtgcagtggtgcaatatgggctcactgctgcctcggcctcctgggctcaagtgatcctcccatctcagcctccccggtagctagtaaagacggggtttcttaatgttgcacaggctggtctcgaactcctgagctctagtgatccacctacctcggcctcccaaagtgctgggattacaggtgtgagccactgtgtctggccttttctgtgattttcatcttctactttagtgtattagtttaaaactcaacagttgacttcccattttattttacttcctttgccccccttctcttcatttctttttttttttttttttttgagacagagtctcgctctgttgcccaggctggagtgcagtggcatgatctgggctcactgcaagctccgcctcccgggttcacgccattctcctgcctcagcctcctgagtagctgggactacaggcacccgccaccgtgcctgcctaatgttttgtattttttagtagagatggggtttcaccgtggtcttgatctcctgacctcgtgatccgcccgccttggcctcccaaagtgctgggattacaggcgtgagccaccgcacccggcctcttcatttcttattatgcttaatttgctttagtggttggcaaaaggcctacctgtaggtgtgggagctgggggaaggtattccaaacaaaggattaaatgtcaggaatgtacaaggagctcctataaatcaccagtgaaaagacaactccagcagaaaaaaatgggcacagggaatggaaggcaatgtataggggcagacccaacactccaccaaaccactgaagagatattcaaagttagtcatcaggaaaacacaagctaaagcaacaattagacatcactctgcaccaatgagattagcaacacagtggaaaggtggcggatggagatgcggcggcctctgtgcgcagctggtacggcagtcctggagagccacctgggactactcatgtgtgttcctgccccacagcccagaaactctgcttctgggggtgtgttcccaacaaaattctcacccgggtccttaggagacacatgtaaggatgcttactggtgtgatggatggggtggggactaatgtccatccctgggaggtgtgcagggacaatgtattggatgacactgtggatcagtacagagcaggttcatagaacacagacctgagaaatagctgagtggaagaattaagaaactgctgtaatcccagcactttgggaggccgaggtgggcaaatcacaaggtcaagagattgagaccatcctggccaacatggtgaaaccctgtctctactaaaagtacaaaaactagctggatgtggtggtgtgcacctgtagtcccagctacgcgggaggctgaggcaggagaatcacttgaacctgggaggctgaggttgcagtgagccaagatcgtgccactgcactccagcctggcgacagggcgagagtctgtctcaaaaaaaaaaaaaaaaaaagaaagaaaaaaaaaaagaaactgatgtgatagtcctgttcacggagactaaaactacatgcacacaaaaccaatacgattgcaaaaatatgtacaaacaagatgtgcatcgcaagtgttgcctgtgggggtgggggtaggacacaaggattggcaataaaataaaatgtaaaatgaagtaagatggggataaggagcctcaagtgttcatctggaggagatgtggattttaggacacatagcccttcttgtctaaggttttagacctgctcaccagtggccccgggaggcaggaggttgtggagttggcttcagaagcctgcctcccacctccaagctcatattctggcaggaaccacttctaccctggatggagtgagtcggccaacaacatgagacattttgatgctttttttccctatcacagcgcatttttactcagatacatgatctccttgggacacccttttaactcgtgtttattctacatgccccatggtacagttaattttcatcggcaatctgaaagccagcaacagccgcagagcttgtctaatcaccaaggagtcaaagacatgcagccccgcggcccctttcagtagaggtgaaggaactcactggaaaagccctccccagtttatgattaaataggctactaaaatggagggtagcttataggatttatctgggcagagcgccttcatacttccagggcaggaaccagtaggacagacagtgtcatttaagtccttcctgctgatcagtatccttaggttggaatttatgctctcagcccatagggactcttgttccctccacttcggcacttggcactctgcttctgagcctttggccttcaggaggcgaaagagaactggatacaccaaggctttgaagatcctgatgagcttttgccatccgaggagcatgtagacttgagctgtgtttgctacacccagatgtggctccctcctctctcttgggcttactgatcatttagaaccagtttaattagcactggtgtctgcttttccaaagattgcctggtaggaggcagaaatctgggccaggttagtgaggcagcatgcaaactggaagagaccaccagggaacttgtacaatgtaagtcttactccaagctttccattgcttggagaagggtgttctaaatcacccttggtcttcccgacttcagttgcagactcagaaggagggcagattctggggcgatttcttgacccagtggtgatggggtcgtgggaactcagcttctagggagacagggtaggtttcctgtccccagattaataaaccaaggtcacttctcctgaactgtgatgatgcctggccctgttcttagtgggcatagatggagttaactttttttttttttttttttttttagaggcggggtttcactatgttacccaggctgatctcgaactcctggactcaagcgatcttcccatctcagcctcccaaagtgctgggattataggcatgagagttagatttttcacatgggatttttgccaattgattagtctgttgccccagccaggattaggacaaaagggctttgcatccccacagcctctcttgattgatcttgttcatgcacagatggaattcggacaccctttgggtatgtgaataacccttacaggccacaggacccagattagtgacaccacaactgggcatcatctgagtagggaggacaggagcactgagctccaagtcagaagatccgaattaaaaaatgaccacctttaatgaggtataattcacatgtaataagtgcactcatttaattggatagtcaatacgttttgacaaatcagtacaccacagtgaccaccaaaatcaaatatagaacattttcacccaaaaagtttctcatgatcttttgtagtcaacagccaccccgactttgccccccagcctcaggcatcactattctgctttctgtcactatgggctaactttgccttttctagaatttcatacacatgggatcatttaggatatactcttttgggtctggaggagacctggtttaagccccacacccaaaattagataactttgtgacccttggcaagacataattttgtcttcaactcagtttccttaccagtgcaatggggtggtaataacttaaaaccagcaagccttccttccttccttccctctccctccctccctccctcctgtccttccatgtgcacaggtgccacagtgagctccattgtaaaattccagaaaggagctgggtcaggggttgctcaggaaacaggagcctctgctccctccacgtgtgtcacagagggcacccgctgcccctccctccatgcccatcccagcctccctggtgccgtggtgtgcaggtccccgcatctccttcaaggtggactccttttatttaaacaagggagataggaagtcaccccggaaagaaccagatgcggtgatgagggcccccaccctcaagatgggcagaggccagaggtgaccaggacctaagcagaggggaggaccatgtcagggggtgggggtgcacagaggcccggagtggggcccgcctggccctggggctcgggacactggagttttcagggggagcagtgagtggaaggctcgtggagctgctggacaccagatgagtgttggcatcaggacacacacattgctcagaaccacccaggaacaatctgatggacacctttgtgcccttcacaacacaactcactgacactggacacccagaagcacttgcagataagagaccactgcacacagagcacagtccctgcttccctggagctcacgtgctaaaacatgacccacatccaggctgcagcccgtccttagccagggatgtggagggtcctgagtctggtcctgttgagtcctgagtcctccagactggccctgccaagttgccaggcatctgatgcagcagagcagcgctatgctgccctctgctggccacatggaggcagtgagtccccacactgctgtccactcctggcaatgggctcaggggaagtggactgtgtttctggtcccttgcttctgacaacctgatagagcagatatggaagggcagaggcactataagaactcttctcccagttccttgattcccccccattattccttgtgtgtcccccacttcccctcccttccctgtgtctggatttaagaaatgacagttgaggcaaatcatgttgctttttcggccatctcctgcagtgtcccctttccatggcctcatcctgtcatggccctgagctgttgcaactggttcagggaggtctctcttggccatctttcatccagtggggatggagagaccagtgccatttctggagggagcacctgagtttggaggtgaaacataggtgataccttatccaggtgacaccttccctaggccacaaaaccatagtttctagatggagctgggcatggtggctcatgcctataatcctagcactttggaaggctgaggctagaggatggcttgaggccaggagtttgagaccagcctgggcaacataggccctgtctatacaaaaaaataacaatttaaaaaattagccgagtgtggtatgtgtgcctccagccctagctactcatgaggttgaggcggaaaagtcacttgagcccaggagtttgaggctgcagtgagctgtgatcagttgtaccactgcatgtcagcctggtcaacacagcgagaccttgtctaaaaaaaaaaaaaataaaaatagatggactggtgccgtgcctttttttttccccccacagattctttgacatgcctcccatgcagaggtggggtctatgtccctctcatgaatctggccaagttggtagtggttttgacccagggttgtgtgaagtgatgtggtgtgacttctgaggctgggtcacgaaaggccatgcagctcctgcctggcttgctgggacactgccacccgagcaagccagctacctgataaccaggatgctggagaggctactcatgggctgtggttcatgatgccatctgagaagtgggtcctctggcccagctcttccagggcccagccttctgggtcactgtcagctgaggcccagacatgcaggagtacagacaagctgtccctcctgtgccctgtcccaattcctgacctggcttctggagcttggtttggagatggagcccaccttgacaatgctgtttccctgggagaatgggccccctcttggctggcttgcaggagctctgggagtctccttcccctgtgactcctaggggcttggtggctctgagctgggcagctccacattctctcaatttcattctgtctgatccatgttagttttatttactttttatgtattttttatttttctgacatagaatctcgatctgttgcccaggctggagtgcagtggggatcatggctcactgtaaccttcaactcctgggcccaagggatcgtccagcctctgcctcccagaatccatgttcgttttaatatgaaagcaacgttttatgcgacaaccaggagctctgaagggttttcacgtggatgagccacacgccgggatttggaattgcgggaagtgcccagcgagtagggtaggaggaatgttgggggtgggactggactagaagggaggctgggacgtcgtcgagaacgagattgcagggacgctgcggtgggagaagtcgaattcccaccctgttcgtcctccgcaaagagtgactgaggctcaaaaagccacagccttgcccaaaacggatgcagcgggcgcaggcacggtccacaccccgaagcttgccgatgccctcggcggcagcccgtcctgcagagccgcgttccctgcgcccaaagcaaggtcggacccccaccgggattcccggaaccgggtgtcccgcgcgtccccagcgcaggcagagacggcgagacttccgggtcggcgttgcacacggcggccggcaggcggcgctggagccccgcgtttgggcagccaggacgcccttgcgctgcttcgggtcctgcgagcgcccagggagggggtgagtgcggggaggggtcagacccgtgtcttgcccggtgcgagctcaccgcctgcccaccgggcacgtccacagcagctcagtcccggtctgagcgcatcggagtgaaaacagcccccgcacctctcgtgacggtgtccccttctctgtccacgttgcaagaagctatactgtactcaccaagtctttaaatcttgaccacttcaccaaggaaggtatgaacctctccattttacaggcccagttcaaaaagcaacgacaaaaatcaacaccagcaaacctttatggagttctaattattgacctggcctgccagggtccttcagagtggagttggggtgggtgcgggagaggggtcaaaagccagccctcaggagggggccacccgcgcagccctctctccaccatcagggctcttgcagacccaagggcctgccaggagaagcagatgggccatggtaaatctgaggggccattgggatgcccagactgtcccaggtcaccccatttctgcatttttgttcattttgttcaggtggccctgaatgttgtgccctcctcttgggaactgtaagtaatacaatcttcctttcaggcagttgactctgtgtctgtcatcttcccatacctgattacaacaaaatcatcccatgtacatttttaaacaactgtctaagattgtcgcagggctcaaatgacttaactttaagtgcttacaatgatgcctgacacatggtaaggctaatcgaggagtagctattgttacatctctttctccagcctcttccttctttgcaccaactgcctccctctgagcaattttgagggaggtttatctcgaggtgcagccaatcccagctgctagggccaagatcagccacgtgctcctttcccttggccatggctttggacactccaagctggcagtgagtgccaggtgagggggctgctaggagccggcaggggggatctcacctttgtgccacttatgtccctaatcaggggcaacctccccaaatctgcacccccaaatcccctccccagcttgactggagaaatcactctaactcccaatgatagcaactccaaatcatagcaataataatttactgagtgcttacagtgagccagacacagtgctagcatcttgtaccagcagttctcaaactttttggcttcaggaaccctttacaccctaagaatgatcaaggccctcaaagctcttgttcatgtgggttgtatctatcactaattaccattttaggagtcaaaacaaattttaataatatttatttataatttatttaaaatagcaataataaacactacatgtgagcataaataatatattcctatgacaaataactatatttcacaacacacaaaatttaaagagaaggaagtgtggctttgttttatatttttgcagatctctataatgtcagccttaatagaagacagtttgatttttatatctgcatctgcaagtttttgagataccacatgtcatgtagcccctgtaatattccactgggagttttaaaaagctttcactgagagcaaaaaacccccacaaataacatgtttgtattattgtcaacattattctgaattttatggaccatctgaaagggtctcagagaccccagaggtgcccataatacactgtggaaactgctgcctgatatacatgatgggtagcttccaatattgccccatttttacatatgaggaaactgaggcacaaggagattaaagtgacttgtccaaggtcatgcagccaggcatcaaagctagctggggagtcacttgattttggtgtccagggtcccagcactgagccctgaaagagagggtaggaactgggcacagaaaaagccggaagggcaggttgggccatgagtgggggagctgggtgtgcagtgaggggtgggggtgggaggggaccgggggatcagttagtcaccaagtggtcctggtgacagggctggagatggcagctggcggcggatgtagcctcgggctggaaaatcaataggtgatcagcggtccaggggcaagctgttcatcaggtgcggcagaggggcaggggcaggggcgggggggctgggaggaaatatcactgacccccggcaggattgatcaaacagccagacacccaaggccaaactcactaataaagtgagacattcagctcagcccggcggctgctgctgaaggtcttaaaaaaaccgcttactggggagttcttgataaactgtctttgtttcttgaggcaagtgggagggaggacagactgtggggaggcctggctcggctgccgtttggcctgggactcatggtttgccccaggtctggaccacagaaccctggtgcttgtatggcatgtgtgcttgcactacagcacatgccatttgtacagggcatgtgcagacacatatgtgcacactatgtcgcacacattcaaatgtgcctgcacatgtctttgcacgcccgtgcacatgctacaacctacatttgcttatggtatgtgtgcacacatatgcatgtgctacagcacatgtgtacaaatatgccttgcatgtgtgcatagacatgcgtgcaccgcatcacatggcatttacacatgcatatgctatggcacatatgtgggcacaaatgtgccttgcatgtgtgcgtatacgtgcatgtgccgtagcacacagaatctgcctttgaggggtgagcatgtgtgcttgggggttaaactctttctccattgtttcactgatatcaccactttctctgcctgtagtcccaaaggtgccacatttgtaatgacagtcatgattattatggggtggggagatggacggaaaagtagggactggaaaactgtatctaaaaggctaagctgtacaacagagagaggcaggtgtgaacaggaagaaagagggggaggaaaagtgaagggccggcatggtaagggctaaacatcgtttggactgggagttgagggagagaaaatggcaggattcgggggtggctgggtagctgttgggggagcaaattaaagaataaaggatatgcaaatataatttttatttttattgatttattttttttaagacagagtctcattctgttccccaggctggagtgcagtggcgtgatctcagctcactgcaacctccacctcctgggttcaagcagttttcctgtctcagcctccagggtggctgggactacagtctcatgcagccacgcccggctaatttttatatttttagtagagacagggtttcaccatattgctcaggctggtctcgaactcctttcctcagatgatctacccacctcggcctcccaaagtgctggaattacaggcatgagccatcgtgcccggctgcaaatagaattttaagaactgtgttgggtaatgacatcctttgacattctttcaggaatccaagtaaagagtagaacctttcccgatcactttctgattgttggactgtgttttgttaaatgtgctaccgtattagactgggcttgtgcatacacagaatttattttgatttaataattacatcactcacattgagaatgaaattttattggaatgcttttgcagatgagaggttttattaagagcttttccatgtgtcatatactaactcgaaggtatggatactacttttatttccattttttggatgaattcattggagctcagaggcttaatcacttgcttaagtcaggtggcttataggaggtggaactgggatttgaacccagccctctgactccagagcccaggctgccttggccattattccagagtatagtggggaatctggggggtcagacaggtagaccaatggaggaacatttgccatccctgtatcttgccccaagataggtgagtagagccctgaggagaggggcagtgcatttggcttgcacaccattcagacccttcacccaccagcagttacagcccatctagccccaagatccctcccccaagatcccctggctgggaatcatctgctctcttgattgctgaagggtgcatggatgcattggaaggggctgggaggatataccaggctctgactttatggtgtgtagaccttaaacccccaaagcctttttggttttataaaagcacagaacaaagtcattgagaatgatcaaggatcgaaaccatgggagaaatataaaactatattttcttaaaatgtggtcattgaaacacctgcattggaatcactggagatatataaaaatggaaattcctgggtgcctcccagatctactgaaccagaatctctgagtctaggggccaagggatctgcatttaaaaaaatgtcttgagtaattcttctgcacattctaatctgatcctttgtatttgctgttccctccacctggcatgctctccctgtagctctctctttggctcccactttcaatcctttagatctctgttcaaatatcctttcctcagaggggtctttcctgctatcttacctaaaataataccccttgcattctcaatactcttgctctgctttattatgttattatttttagctacatggatgctaactatatgtaaataaataatatatagtgtacaatatagataacaatacatgataaagccatttaatccatatcagccttatcaatgtgcttatttgcaccttttggtctgctccctgagaggcgaagctctcggagggcagggctggcctgccttgcttagggttgcaccctcagtgaactgtattgggtctaggagaggttgatatgggggaggggatgatgcatgcagagtgcccaaggcttagtgggtgctcaacataatgactgtatcctaagcgtggtgtatactatgaaaacaaaaagccataagcttccttgttctggtagtaattccctacccctccaccctaaggaccagtgaaactgttatgagagtgaccaagaagaaacgtcttctcttgtcctcttcaatgtctgaattctgcatccagcacattatcttcggtgtctcccccatttacttccctcgccttcttccttaaggaatatcagcaatgataatcccagcgactggccaggcacggtggctcatgcctgtcatccccgcactttgggaattgaggcgggaggatcacttgagctcagaagtttgaagctgcagtgagctatgatcgtgttgctgtgctccagcctggatgacagagcgagaccctgtctcaacaaaaaacaaaaaaactcagaaactataggtactggtagacatgctaatttcacatcttaagtagactccttaactctttctgttgcactggctctcagtcaattttggggaaatctctctgggaggggaactctcaggtccaaggctggcaaaggaccaattgagttcctcttctggaggactgggtgacacagacactcaggtcactgtgtttgccctgaaggtggatggcagatgggctccaaagatgctggggtacagatcccctctgcctttggtaagaggctggggaggtctggccctggtggagcccccaggctgggacctttggaccagagcagcttcatttgtgtacccagtgaatcttacggattttatcacattctctgtgtgccataatgtgaagaacgttgggaagcattggtgtaggtgcaggggtgaaggcagttgcattgggccatgaggccatctgtgctttgtttgctggtcttggaccagcctctgtttgtgagtatgagcttgtctgggcctctgtttcttcaatcagtagcactgtaaccaggacactacagcagatatagcccaggaaggggccaagggtcttgaaagggcagaggcagtggagtggggacgatacagggagtctgaactgggaagggccttgctaagaagaatgtgaagcctaaggtgagacaagagattattcgagagcttggagcattgatatatgagttgggtatgattgtccctatgtttcagacaaggaaaccaaggctcagagtagtggaaaagctcaccacagtcaacggcagaactaagtgggcctgagtgctttcttttcttaatgctgccccttgtagctcaaggaaatttgatgaagagtgttttgaaacttcagctggctcttgacaagtgtttgtgtgacattttggtgggagagatggagatatgtctgctggtatttgggacaattgggtacatcgcatcagtaccagtgggaatagagcagccttgacatttcaccatctgaggaatggcaggaggactgagaccattctgtcggaagaatagaaaacttagagggtgcgttgagttgaataatttgccccaaaagatatgtccactgagaacttgtgaatgtagcctttttttttttttttttttttgaaaaaggaatggccaagcacagtggctcaaacctgtaatcccagcactttgggaggccaaggcaggcagatatcctgaggtcaggagtttgagaccagcctggccaacatggtgaaaccctgtctctactaaaaatacaaaaattagccaggtttagtggtacatgcttgtaatcccagctacttgggagactgaggcaggagaattgcttgaatctgggaggtggaggttgcagtgagctgagattgtgccactgcactccagcctgggcggcagggtgaaactctgtctcaaaaaaaagaaaaaaaaaaaaagaaaagaaaaaagaacaagaaaaaaaaagataaaaggagttcttgcagatgcagttaaactaaggatcttaagatgagatcatttgggattatctgggtaagccctaaatgcagaagaggaaaagacatagacagaggagaagctgctgtggagacagaggcagagactggagaggtgcagctgcaagccggaaatgccaaagactgcgggcggctgcaggagctcagagacaggcatgggacaggttctctctcggaccctccaggaggaaccaatccggccaacacctctattttggactgccctccttctcagaactgtgtgagaaggagaaatgtctgttgtttgacatcaccaagcttgtggccatttggtacggcagccctggggaactcatactggggggtaggatgccgtcctcaaagaaatgagggttgtcatgtggaagagggaccctactcactctgtgtccctggaggaatgtgagctttcctctgagcttctaggtccttaggaaaagggctccgtacagtcagggggttcagggatggagtgggctgcactggggaggtgtgagtaccccattactgatatgccaccagggagtttcaactggcatctgttgtgtagttgaacttgaccatttgtgaggccccctccagccctgagaatctatgcactggtgcaaagaaagaggtaaatgtttagagaggtgacagaggacctagagctaatgtccaggatgctgcccaggggccttagagatggtgacaatggttggtggggatatgggtctgttggagaggaggaagaagaggaagagagcctgactgccaggcaggcaggggtatctttggggctctgggagccccagcctctggattctgccctcagtgagctttgcaggacaccctaccataccccctccctgctttcttctgatagagtcgtttccatttggatattgccttgaacatgatgttcacaatccccaaagggaagaacatccctcaataagccacacaattctcccagccaagaacttgctgttccaaattcattaaaattgctgtgatattctcttcccatttatgtgccaagagccgttgtggacagaattcataataccatggagtggtggatgaaaccgattgtgcagtcagaaagaagtgaacttattttattttatttttaataaaagtgtacctttcaggttggcaacaaatgcgagtgtgggtgtggggaaatggcacactgatgtgtttattaagggagcacaaattggtccaaccccaatggatatcaacttggaaatgatataagatgcaaaatgtgcatggtagttttgagttttttagtctctaaaattcaggtgggcggccgggcgcgatggctcacgcctgtaatcccagcactttgggaggccaaggtgggcggatcacctgaggtcaggagttcgagaccagcctggccaatatggtgaaaccctgtctctaccaaaaaaaaaaaaaaattagctggatatggtgacacagttgtagtcccagctgctcaggaggctgaggcaggagaatcgcttgaacctgagagtcggaggttgcagtgagccaagatggtgccactgcactccaggctgggtgacagagcaagactctgtctcaaaaaaaaaaaaaaaaagtgaaattcaggtgggcaagatatgtcagttttagttagtctgtgattgaatttgttttttgtctcaatacctccctctccctcccttttccaccagaaggtagaaaattaattctaggtaattcaagataaactcgccatttgagggggtcttcagcccattaagatctcttctcttacgttccttcctgggggatttttgctttaccttagtaaagaacctttccttgcttcctggggggcgaggcactgtatttgggggtgcttatgtagtgagtccttgctaggctgtgacccctcactgcaacaatggtgctggtgaaggtgtctgtggaccagcgctgagttatctgcgccatttgctccttactgtgcagcactgagagcctttccggtgtgggtcccagctcacttttctgatcttctcaggtgcacacactcattcagctcttcctccgtgctactttggagctgtgaacatataggggagtcgcctgcggctgcgtatctcccccaccatctctgctagcatggctgaagattgcagatgggagctggctggagcccaggtcacctctactttcagatctccaaactcattcaaggcactatctcccccatcccatactcagcgcctacctgagcagcataccaacccacacggcctttctctggagaccttcatccctagtctgttctcgacctcctccctccagcttagaatgtttcccttgttttgattccctttttgcaggaagaaaagctcactcaacaagcactcttctgcatcttacctcttgaacctcaaagccaggaacatccccactttcctcctctatgctcctccacatcgctccttctgccaggcgggtgcctaaattggagtgagttctgggagaaaaaaaccaatgggggccaggcatggtggctcacacctttaatcccaccactttgggagaccgaggctggtggatcacctgaggtcaggagtttgagaccaacctggccaacatggtgaaaccccatctctactaaaatacaaaaattagctaggcatggtggtgcgcgcctgtaatcccagctactcaggaggttgtggcaggagaatcgcttgaacctgggaggcggaggttgctgtgaaccgagattgtgccactgcactccagcctgggcgacaagagtgaaactccgtcttacaaacaaacaaacaaacaacccaaaaaacaatggggctcatacaacacttgtccttttgtgttcttcttatatgaaatatatagaccagtcaaattcgtggagacagtggaatagaggttaccaaggctggagggagggggaaatggagagttattgcttaacaggtacagggttttgtttggggtgatgtaaaaagtcttggagatggataatggtgatggttgcacagcagcaagcatgtatttaatgtctctgaatgaactgtacatttcatacttaaaacaaccagtgttatgttatatatacattatcataataaaaatagtaaaaaataaataaatgccagcaacagagcagaaaataaaaatcccgcatcacatcagccaatacttgacaacagctttctgactttgacccgttgttccatttaggggtcttgagtctgtggaaaccctggccggggtgtacccagctcgagtgcaggggggcgcgtagcagcagcctggcgtgtcatcgtgagacacgggagacaacctgggtatccatcaatgggggaccaagtgaataaatgatggcggagccacacaatgccgtgctgtgcagtgggatgaagaatgtgccctgctccgtgtatgtgccgacgtggaagatgcccacgatgtattgtgcagggagcagaataatgtgtgtggtagcatcttgtttgtgtaaaaaggcctatatatatggaatgggtatgaatttgctggacatttgaggtaaaggaagtgcgacctccttcttggctccctcccttttttctctctttaccagataaggatttatatttgctttccttacttctttttcctctttccacaactgtgattttctaatctacgtgtctactgtgcctgacagtcattttcatctttttttttttggagggggcccgattctcgctgtgttgcccaggctggagtgcagtggcatgatctctgttcactgcaacctctgcctcctgggttcaagcgattctcctgcctcagcctcccaagtagctgggattacagacggctgccaccatacccagctaatttttgtatttttagtagagacgaggtttcaccaagttggtcaggctggtctcgaactcctgacctcaggtgatccacccacctcggcctcccaaagccctggattacaggcatgagccacagcacccagccttcatctatttttaacatgtaaaaaattttgagagataactaatatacagaaaagtgcataaaacagagatgtctagtttaaacttataaacacccacgtatctaccacccaggcctagacattgaacagtgctaagcacccccatgtgccctccccagttaactccctcaagaggtaactgctcttcatttatagtaacaatcattgcttttaaaaactcattttattacccctgtaatcccagcactttgggaggccgaggtgggcggatcatgaggtcaggaaatcgagaccatccttactaacacggtgaaaccccgtctccactaaaaaatacaaaaattagcctggcgtggtggcaggcgcctatagtcccagctactcgggaggctgaggcaggagaatggcgtgaacccgggaggcagagcttgcagtgagctgagatcgcgccactgcatgtcagcctgggcgacagaacgagactccatctcaaaaaaaaaaaaaaaaaaattcatttcattttgaataaatttagattgatagaagagttgcaaaaataaaccagagaattcctgtatgccctttgtatactcacatacccttcactcgccttcccctaatggaaacatcttacataaccacagcatgtttatcaaaactgagattgacactggtccaacactatttaccgaactacgaacttcatggatgtcgccagtttcccatgaatgttctctttctgttccgggatccactccaggatcccatattggatttagttatcatttctccttagtttcttccatccatgactgtttcttggtctcttcttgtgttttcatgactttggcacttataaagagtgcttgtcagaaatttaagtagaaaagtaagaaaagccaggtagaatccttgcttttctttgtaattttcctctcctaagtatatatccctgaacaacatagttaggtttggcctgttttgaattttatctaagtgaactaatacacgcatattcttttgtgtcttacctttttcatttaacattatgtttttgggggaaccattcatgtttttgtgtgcagctgaagttcatttttcttgctgaatattattccgttgtatggctgtaataataataatgcaatggctataattctggattgtttctaggttttggctattgcaaacaatgctggctgaagcattgtttctttttattttactttaagttctaggatacatgtgctgaacgtgcaggtttgttacataggtatacatgtgccatggtggtttgctgcacctgtcaaactgtcatctaggttttaagccccgcatgcattaggtatttgtcctaagcattcttttttttgagacagggtctcactcttgtcacccaggctggagtgcagtggccccatcttggctcactgtaatccctgcctcccagattcaagtgattctcctagttcagcctcatgagtagctgagactacaggtgggtgtcaacatgcctggctaatttttttgttttgttttgttttgttttcagtagagatggggtttcaccttgttggccaggctggtctcaaactcctgacctcaggggatccgcctgccttggcctcccaaagtgctgagattataggcatgtgccaccacgctcggcagatggccgaagcattcttattacatatctcctgaaatagttgggcccacatttctctaggagaggaaaccaggagataaatatccaggagaggaaactttggctgaagaatttccatgtcttcagctggactagatactgccagactttcttccaaagtggttttaccaatttaaacagccccacctgcagcgtcaagttctcagtgtgccctatcattattttttcccctagtccttagtaacagacatcattattttttgaaatcaaaataaatcagtcaagattctggcaggaaagagatgtacacaaaatgcttataacaatgctagggttctatttaagagcatttaataaagagattatttatacaagagtggccaggatgaaaggaaccaataagaaatgctgagacacccaggcactagggcagcaggaagctgttgctgcctctggggctgaagggacaggagggagaagaggggaaagcggaggtccctgcctgggctgtaagcacacatcagtgtttctcaacccgtccttccttcctttctttctttcctttctttctttctttctctctttctttctctttctttctttctttctttctttctttctttctttctttctttctttctttccttccttccttccttccctctttctttctttctctcttttctttctctctctctctcctttctttctttcttttctttctttctttctttctttctttctttctttctttctttctttctttctttctttctttctctttctctcttctttcttttttgagacggagtctcactctgcagtaaagtggcacgatcttggctcactgcagcctctgcttcccaggttcaagcgattcttgtgcctcagctccagagtagctgggattacaggcacctgccaccacatctggctaatttttgtatttttagtacagatggggtttcaccatgttggctaggctggtcttgaactcctaacctctagtgatccacccacctcagccttccaaagtgctgggattacaggtgtgagccaccatgcccggcctcaacctgtttttcatcatgacaccctgttgcatgttgaattgtgtcaccatccaacatatgttcaagtccaatatctgtgaatgggaccttatttggaaatagggtctttgcagatgtaatcaagttaagatgagatctgtcttagctcaggctgctagagcaaagtatcatagactggtctcgaactcctgacctcaagtgatcctcccgcctcagcttcccaaagtgctaggattacaggcatgagccaccatgcctggccctgtgctgtggctctttggagggtcacaaattattgcaatatataaggttatgtctccccaggaaccagtggtcaccctcttgggggcgtgattgctcttgttgaggctgcaggagccagagggaagagccaaactgaggggaggcagagaagggaccagagaacagacccccttccctgtctttccacccactcctgggtggcctcctgctggctggacttagccaagagccaaggctgagggggttcaggggtgctgccttctgagatcagccccggggagcagggcagggctaagaggggcagagaatgggtgcaggttggggcgcccatgaagaacaactcagttcacagccccagctgctcccagcgtctgccagtccttctgggggctgtccttcctctgctagaaaagtaggagacccccccaaggccaacatggcccagaaaaatgggaggagaggctgattttccatccagatggcctctccaggtgatcctgaaccacatgacctatctgaagctgggcagctgcacttcctctgtgcccagccaggacgaggggctcttcacgaggctctgatgttgtggcagtcaatacaggcctcccccagcaccccatagccctcctgggtgccatggaggagtgcagttcagcatccctggcttgcagctcccccacctccccacctggcctccccaccccctcctctttaacaaggcttggaacccttcccctcccagactcttcaggtctatttcctcagggaatcgaggtttctataaagaaaagcataaaacgagatgaacatcagcatcttagggatgatcacagacagcagagtatgggagattagtttgggttctgggccaggttgcctgggtttggatcctggatttgctactcactggctatggaaccctgggtaggttacctaacctctctgtgcctcagctctctctctgaaaagtggggatatgacaatatctgtcttacagagttattctgagcattaaatgagctaatggatagaaagtgcttagaacagtgccaggcatatagtaagtgctatgtaagagttagatctattattactttgctaggtgtgtctctattttgaatgtgccatagaaagttctagagttggctggccaggcatggtggctgatgcctgtaatcccagcactttgggaggccgaggcaggtggatcacctgaagtcaggagttcgagaccagcctggccaacatggtaaaacactatctctactaaaaatagaaaaaattagccgggcgtggtcgtgtgtgcctatagttccagccactcgggaggctgaggcaggagaatcacttggacttgggaggtggaggttgcagtgagccaagatcatgccattgcactccagcctggagtgccaagagcggaactccgtatcggggggggaaaaaaaaagaaagttctagagatggctaatggtgccacctcacgggagtagagctgggcctacaggagaaaaactttcactttttaaaaatacttactttatgttattgaaaaaaaatttttttgagacagggccttgctctgtgggagtgcagtctcagactggagtgcagtgggggaatcatagctcactgcaacttcaaacgcctaggctcaagcagtcctcctgcctcagcctcccacatagctgggcctatagatatgaaccacctatagacatgagccaccccaccacacccagctaatttttattgatttatttttggtagagacagggtcttgctatgtttcccaggctggccttgaactcttggtctcaagtgatcctcccaccttggcctcccaaagctctgggattacagtcatgagccatagtgtctggccttatttaaaatttttaaaacaagcaattgtaatagtatttaggaataacatatttgctctagaaattttaactttttttttttttgagatggagtctcgctctgtttctcaggctggagtgcagtggcgagatttccgcttactgcaacctctgcctcctgggttcaagcgattctcctgcctcagcctcccaagtagctgggattacaggcacctgccaccacacctggctgatttttgtatttttagtagagacggggtttcaccatgttggtcaggctggtcttgaactcctgacctcaggtgatctgcctatctcggcctcccaaagtgctgggattacaggcgtgagccaccgcacccagcctcagaaattttaactttttaaggtaaaatataagtttttgcaaaaatatgataagctttgcaccatttagtgtggaatataagacatgacagattgtcgtcagtctccctttcactgcatgtgagcttccagagaaaaatttatgggtgttcctgggattggggttggacttgcctaattgcctagattgggagttcggtaaacttctcctgctggacgtggaggaggggctgagccttgggctgcattctctgcacccacctctagtaggcctcccaggaccacccaccgcccagcacctgccctggttgccagggaaacagccctttatcgagtggagccatccccaactcagcccagtgatttgtccttgtctaattattattactctttgcattttccttttggatgagtgatgggggagggtcggggggggtgggagggtgcaggagcagaggagcagtgatttgtggggctggcagcttatctttgagaggaggacatttatctttctggaagcagaaaaccgcccaatggagacaaattcagcagttcccgagtggttctgtttgtggattcacacactgatctggagttaccgacctggaattgcatgtgcacgtgggtttggggtgtgggaatgtgcgcacgtagcaagcagacctctcagagtggctctgtccagagccacagtcctgtgagcgtgtctgtggttattgtgtgctcactgtgtacagctcctaaaatggtatgtgcacacgtctgcatgtgtctgaatgtgtgtgcacactttgactagactaggcaacctaggtgtgcctgcttgcatgcactcatgtgataacatgtggctgtgtgtgcacattgtagacaaagcaaggaaaagctgggtgggtacagattgaatatgtagctatcaaatgtgtttgtcttcatggggctctgtgtgtagggcctgagcacatgtgtagccaacttctgagcaggcctgcatgtgaacattgtacacattgttatgagaaccaaaaaatagaccgtaaaatcagggtgctgacctaagccagagacacctgagatgaaggcatagggtttggatagtatggaagatatgcacactgcacattttagtagctggggtagattgcaaaaacatccccactcatttgtccctgcccgaatccttgccctttcaatgtgactttgcagttcctcctaatagaagataaagtctattcccctaccgtcttgacctggactggacttgaaacttgctttgggcaatagaatgaagtggaagggacaatgagtcagttctgagcctaggcctcaagacagctggcagcttccactagctctcttagaactgtgcccagctgcacatgaacaaggctcagctaggctgctggaggatgagggaccattagagactagggggagaacagccccagttatcctggctgcagccatcctacaccatcttagagccaactgacttgcaaatacatgagagagtccggccaagaccagcagagctgcccttcctaacctttagttgaccacagacacatacgtgagccctgctgactcacagacatgtgagcaattacagttgtttttaagtctcgtgagtattggggtgatttgttatgcagcattattgttgcagtgcataactcattactaactaaatactcagcatacacacagatgatgtacacacacagcaaaagcatataccattgacatacacataggattgttggctctgtgtactaaaagtattagttagttatctgttgctgttacaaattactccaaaatttaggagcttaacacacaaacatttattacctcatagtttctgtgtctcaggaatcagggcatggcttagctgaatgtctttggctcaaggtctttcatgaggttactgtcttattattggggctgcagtctcatctgaagactcaactgagggagtatccacttccattttcactcacaggttgttgtcaggattctgttccttgatggtgattggttggggcagggtctccctcaattccttgccatgtggggttttccacatggcaagcttacaacattgcagagtgagacagagagagagagagacagagagagagagagagagacagagagaagcaatggtttttttgtaaccttattgcagaagtgacatcccatcatttttgccatatttgttagaaaaagtcacgacatccagcccacactcaaggaaaaaggagaggggattacatgaagtgtgaaaggagtggggggatcactggggactgtctcagaggctgcctaccacacagggtgtacaaataaataggctcacattcagctggactagctgtacaagatcagcctttttttcatggcttttgctcagccaaagacactgagtgtcagagaaagtgggttttgcaggttctaaagacccaggtattctattctcttggtcctgtcattggagctaaggctattttgcctagaaaggaagctctctctgctgtgggatgggggaggaacacttcactccagaccttccaaccaggattccagacattcacatcctgaagcttgaggagggacaggaatcctcaggttctcagagaggaggagcctttacttagggtgtggctggaggtggagatgcttgagaccctctagaggggcagatgctgagagctttctcctttttgggcatctgacctggagtaatgtggtctccctgtgggatctgattttccttccaagccctttctcctctgtggtctcagggctgggctgtctatgaacatcgcagacccagcctacacttccccgagatgggcaagcccaacctcttcctccttagagctcacctgccctttccactcccttcccaacctgcaatttcaggtccctttgtcccctccccacacccagagctggatattgatgacctgggaccctgtacactgcagcagcactgggcaatgcgcagctgtgtgtgtgtgtgcacatgtgtgcgtgtgtgtgagggtggtgggactgaggtggggggggtggatttcagtccccatatgaagcctgctgcagatcaaaataggcagatgaagtcaggagtggtggctcacgcctgtaatcccagcacttatggaggcacaggtgggaagatcgcttgagcccagtagttcgagacctgcctgtgcaacacagcaagatcccgtttttgttaaaaaaaaaaaaaaaagaagggtagatgtcctgccctgtgaaccagcctcatgttgaaaccttctgttaggagagtggagggcaatgtgtcctcccagagtctatgtggggctccagcccaaagctgggacccactgccctgcaggtattcacccctctccctgcttagagctgcttactgcactgcccagggggccagactgtccacccccaggacaaacttgggctaagggtgaagtcacgtttcccagctcagagctcttgaactggagagtttttgagccccttgtgtagggtcccagtccctctgctttgaacaaacgtgtgcgtgagggtcttgacatggtccagggagggatgatggagtttggactcggggggaggcggtggggatggagagaagtgtgggtgggtttaagagacatttaagcagtcgggctgacaagctcagaggatgtagatatggcggctgggtgaggagatggtgcaggagggagggggaggaggaagaatgacacacagcatgttttctgtaaagttcactggggataatgagtgcctctggcatttgagtaacaaatacagcagctttagtctcctgtccgggattggctctgaggcactaatgatacctaatgatatctgcatgcagaacttccagaagggcaggtagaaacttagctacaagaggtcgctttctgggaaaagaggcagagtgtattccctgaaggctgtgtttccgtaggaagttggaagttgggcatcctgagactctgcaaggacagtccatgtccacccctcccctccaagcccctacccactcaaggtcatccctcaggactggttcctccgtgccttttctccttacccctaccctttgcttcaatccagccctgtttctgtttttgttctctgagctctggactctgtatttgtcaggactttattgacttgtgtaatgagacacttagagatacatccgctttcaggaagcgctggatccaggagattggccagtggtgtcaggtgtcagctgtgctttgtctttcaatgctcctttccttttcatgttctttgaaaagttttttatgaaaaaatttttttttgacacgaggtctcaccctgtcacccatgctggagtgcagtcatgcgatcatagctcactgaggcctccaactcctgggtttaagggatcctctcacctcagcctaccaagtctctgggattacagactgagccactgctcctggctctgtgttcttgagtctcagtctacacagctgcagcaaccctagattttcactttcatgctgaacaacctcagagcaaagaagacctttattttcaggacagttccagcaaaagcctcaggactgactcactggtatgaaccagtcactggcccagcaggacgtggcaatttgcctggctgggcatgtatgggtgctcactctgagggttggcccagcccagctcaaaccacacagcctgaacgtgggagaggggtggtcctcagaatgaaattggggtactaaaagcagagcaaagaggaatggaggccaggcagagaggacccatggagactgacctcagaccctaccttgtctctgtctccttcctggcatctttgacttccagtattgggaactcactcactcatccaaccccaggtttggctctgacactgctttggtcacctggggtaggaaattttgctctggactcaccaaaccttgttcttttcctaaccactgaagaggaagcagtgtataagggtcctccagagaagcaggaccaataggatgtacatgtacacgtggaaacagattgattctaggggcatgactcctgcgatgatggaggctgacaagtcccaaggtctgcagggtgagttggcaagctggagatcccagagagctggtactggagctcctgcctgaatgctgggagagacccaggaagagctgatgtttccattctaggaagagcgcaggaaaataggtcaatgtcccagttggaaagaggttaggtaggaggaaagattcacttttacagcagggagggtcagccttttttcttctattcagcccttctactgactagtgaggcccacccatattatatgtggtgggggacagtctactttactctgtccatttaaatgttaatctcatccccaaacaccctcacagacacacccagaataatgtttgaacaaatatctgggcactccatggcccactcaagttggcacataaaattaaccatcgcaagcaccaagtaggtcatctctgaccctctctaaggccgggtcagagagctggtcagaggactgggctgagttggaactctgacagggcatcctctctgtgccccgaatgacctttttgcctaccttggagcaggttgtgtatttcatctgcctgtacctcattccaaaatattatcttccttggttaccatcagggcgggggacccaggcgaggtctgttgccaagttccctccataggctccaactctgtcaggacggggtccactctattatctccacactgtcctgtgccccgggaagcctgactcctgggggccggggcttctgggctccaggcggggtgggtcctaggagcccccttgggatcggagaaatgggggagagctgccaggggtcggttcccctgctcctgccacaggtgtgtccctcttccctggaggcggccctccctgcggctcccccggcacaggctcaatgacactgcccttcttcctctcaccctcaggtacagggacatggctgctcctgctggtcctggttccagggggctcccctcccctgttggggctctcgaccgtgcccacacctctgacagtcccctcattttatctctgcagaatcccagcaggctgtgttgagagtagtgttcctgtgggagctacccagggggagcgggggccagctcggccctgagaggctgtgttggggggaccgtcctaccctgtgggcactaccaagtctatctaaggctttgtgtccagagaaggctcagagcagtcaacagggttatcctaagcgaatcctaccctccatcattggtatgatgaatttgggcagttaactgagcctgggtcactttcttttatcgcctctcattcattgtgtgacccatagaaagtcaagtcaggtgagctttctaagcctcaattgcctcatctgtaaaatgggtatactaagacctcccccaaggccactctccatagcttatttcatcctgcacagtggactttgtctttggggagaattaagtttggccccaatttcattcattcatttgttcatacattcagggactgccccctggacttcacagcatgctagaggctgggttggacccctacccttcaggtcagaagcaacttctctcccttctctccctttctccttcataaagattttttttttaaaaagttgactttatcgaggtataatttacataaaatttgtatatttcaggtttatagatcaaccatctttgacaaatgtatacacctgtgtaatctgcaccccgaccaagacatagaccatttccatgagtctggaaagttccctggagttttgttgcagtcacctgccacccacccccctcaccatcaagccacgtctgatccagtttccatcactatctctcagttgaaattttcatttgctttcattttgcctgttgtaccctttccctttcccttccctttctttttttctttttttttgagatggggtattgctctgttgcccaggctggagtgaagtggtgtgatcacagctcactgcagccttgacctcccagactcaagcaaccctcccacgtcagcctccagagtaacagggactacaggtgtgcaccactactggctaatttctaaattttttataaagatgaggtcttgctatgttgcccaggcctgggctcaagtgagcctcccacctcagtctcccaaggtgctgggattatagatatgagccaccacacccagccgtgttttacacaaggagagcacatgtctccttggtaaaacaatattcattttcctataacctatctttttcaaccattgccagtaatggccagataaaatacatgaacacaaacacagacgcgtgcacatacgtgtacctatgtacacacacaatcctctcacatatgcacattcacacttacacacatacatgcattacacaaacttacatatatgcatacaaatataggttaaggaaactttttcaaggctcaaaaagatctaggccatggtgagacagaacacagttgtgtttttactgaaacccctcgtgatagtgcacacatgaacacacatgcacacaagccccaaagctgagaatcatttgccatcacttcctgctcccctgtcagagtcagcgcaagaggagaaaaatcggaattctttccctgtctcaaaagtaaaagggacaaattagtttcttgtcagtgcactgcaataaatacattgtcatttttatcccccagtgaatcatagtctccatttctcccgtaactattatacagtctgctggcactatatcattttttggtaattttattttcaccaattgttttatgaaatttttgagttttatggacactaaaacaaatctagcctgcgagtgttatagccctttaaatcatcggcaggaaatctcaaggttcctccagactgtggtggaaggaggctttagggaagaaagatcgcccctagcttataaactgagcaaaaacccagagataagtttgtaaaagggacatagatcatggcgggtgaaaactggggtgtaaaacatctccctgctcagctcctataagaataaaaatggacttttatttagcagaaacactaaagtagttggggagaaggaacacatggtcctaatctcctctttcttagccacaagagcctgtatttccctgtgggtcagtgtgagcctaactccagcagctcatagccaggagggtaaccaggttagggaccatctcagggaagccaagaatccccgtgatgttggcacaaaacacaaccctctatatgaatgtcaaggtcatatctctgatgtcagtggaaaaagggataaaactgactctaaagcacatgggaaaagaaaaaccaacaatccaatccaacaagaggagaagagctaaattgatgtgaaagaaggtttgccttaccaggtattaaaatgcattataaagctacaataataaaagcagcatgttactggcatacgactagacagacaaatcaatggaatgaaatagtcctaaataaaactcagtccatgaaaaatgaaagatcacatatcaatagaagagggatggattattcagtaagtgctatctgtaaatgtggtaatttggaaaacagtcaatttagatatttatctcattcaagagtccaaaaaataaaaactagacagatgaaacatttgaaactaaaaaattaaacaataaaatgctggaagaaagtattaaaaaagtatttgatttccagatgaggaggcttttatccatgactttgggtagaaccgctaagaaaaaagaccaacagatttagcttgcaatatgtttacatgcctgcatttcaagacatatcccccacctagaggccaaaagaggctgggcatggtggctcatgcctgtaatctcggcactttgggaggccaaggcaggaggattgcttgagcccaggagtctaatatcagcctgggcaatgtggcaagactctgtctctacaaaaaataataagaaaaaattagccggacatggtggcataagcttgtgattctagctgggagggtaaggtaggaggatcgcttgaacctaggagattgaggctgcagtgggccgtgtttgcaccactgcactccatcctgggcaacagagcgagaccctgtcacaaaaaaaaaaaaaaaaaaatgctgaaagataagctgaccaaatctttttgacatacatgacagcaaaagggaaatctcttgataaagaaaatcactaggacttaatggaatgggcagaggatacaaccctacaattcattgaagaaaaaacaaatatctcctaagcgtaggaaaacatttcccaccatactagctgtgatggttcattttatatgtcagcttgtgcccagacatgtggccaaacattattctgggtgtgtctacttctggatgagattgacatttgaatttgggtagaccaagtaaagcagattccccttcctcatgaaggtgggtctcatccaatcagttgaaggcttgaatagaacaaaaaggctggccctcctgcgaatagaggagctcctcctgcctgactatcttcaagctgggacatcaggttttttttcccctgggtttggactcaaatggaaacattggctcttcctgggtctcaagcctgctggcatttggactagaacaacaccattggctctcctgagtatctagcttgcccaactgcagattttggaacttagcttctaaaatcgcacatgccagttccctctactgaatctctttgcatatcaatatcatctctatctatccatctctcctcttggtgctgtttctttcgagaactgtgactaatgcgctgggcatcaaggatatacaaattaaaatcccactgatatgctagtttttctcatgcctcttgattttttgagaattctctgggattctcctgatcagaatctagacaaagcttatccaatgtgtggcctgtgggctgcatgcagcccaagacagctttaaatgtggctcaatgaaaattcataaactttcttaaaacattatgagtttttttgctatatatatatatatatatatgttcatcagctattgttagtattagtgtatttatgtgtggctcaagacagttctttttttttgagatggagtctcactctgtcacccaggccggaatgcaatggctcaatctcagctcactgcaacctccgcctcccgggttcaagcgattctcctgcctcagcctcccgagtagctgggattacaggcgcgcaccatcatacctggctaatttttgtagttttttctttttttagtagagacagggtttcaccatattggccaggctggtcttgaactcctgacctcgggtgatctgcccgcctcagtctcccaaagtgctgggattacagccgtgagccactgctcagcctcaagactgttcttattcttccaatgtggcccaggaaagccaaaagattggctatccctgatctggacattcttaagtgtctcccaacttaaaaaatgatctctctttattcccacagctgtgtcaaatcattagctcctcttgtccctctcacagcccactttctttaaactgctctcaagacctgcctcttcctctcttgccatccagtcgtcaaacccttccacgtggcttcccacctgtctctcctgcggaacctcatgtctgggtcctcatcagggtctgcctgtccaccactccaggggcgccgtttgcaggactttgatgggggtgatgccctgctgtgcagtacagctgccctgctgcagatccctgggagcttgcagccctttccttatcagagctttcaggtacatttgacccgaggctggtagaggtgaggtttatgggaggagaagagaagagagccttccacggagtttttaacccgcatttctgccccactctttggaagtaaatgagtacatgctatttccttgctatctcaggtaggaaaaacaagctccaaagagtcatccttttcattttatttaactttgtgtttaaaaatgtaacagatactccgttaaccctgaaaatctgaacaagtcttactagttctttctacccacccaccttagcttgccttattattattattttttgtgatggggtctcgctctgttgcccaggatggagtgcagtgatgctatcatagctcactgcagcttcaaactcctgggctcaaatggtcctcctgcctcagcctcctgagtagctaggactacagacatgtgccttcatgcccggctaatttttcttattttttgtagagatgggggtctcactatgtttgctcaggctggtcttgaactcctagcttcaaacgatcctcttgcctcggtctcctaaagtgaattcgctgtattgttaatgtgcaaatcgtagcatctggcacataggaaaaggtataggagctgtcatttgaacccaggtgtcctggcttcacaatttgtcatttatgtcctggatgctggttgcctctagcctgttctccccccagcagccaaagagaacattctaagactaaaattctatcactctcccagtataatagaagccttcaaaggcttctatttgcatatacaataaaagtcttgcctggcccccgcctgtctctccagcctttctttcccacctgttccttcgatcactttggtttaaccacagtgacctcatttatgtttctttttttcttgagacggagtctcgctctgtcgcccaggctggagtgcagtggcgcgatctcggctcactgcaagcacggcctcttgggttcacgccattctcctgcctcagcctcccgagtagctgggactacaggagcccgctaccacgcccggctaatttttttttttttgtatttttagtagagatgggctttcaccgtgttagccaggatgctctcgatctcctgaccttgtgatccgcccgcctgggcctcccaaagtgctgggattacaggcgtgagccaccgcgccccgcctcatttatgtttctagaacactcagcacttgctcatgtcaggaccttcggctgagccgtgccttctgccctgtcagctcctccctgctgggtttcctgtggctggttcctgctgttccttctggttaggcttcagattaacccccacctcatcagagaggccacccctggccacagtttaaggagccagtgagtgccccttttattggttatcccagttgatatggtctggctgtgtccctacccaaaatctcatcttgaattataatccccacaatcctcacgtgtcaagggcgggaccaggtggaggtaattgaatcactggggcagtttcccgcatactgttctcgcgatagtgagtgagtctcacgagatctgttggttttataaatgtccgacatttcccctgttgcactcgcttcagtttgctgccttgtgaggaaggtgtctgcttcttctttgccttctgtcattattgtaagtttcctgaggcctcctcagcagtgcagaactgtgagtcaattcgacctccttcctttgtaaattacccagtctcgggtgtttcttcatagcagtgtgagaacggactaatacaccagtcttttgttggtttccttttcagcacttttcatagcttgcagttttcttattttatttatttcgttttattctgagacagtcttctgctgtcacccaggctggagtgcagtggcgtgatttcagctcactgcagcctccatctcccaggttcaagcaattctgcctcggattcccaagtaggtggggttacaggcatgagccatcacgttggctaagttttgtatttgtggtagagatctggtttcactatgttagccaggctggtcttgaactcctggcctcaaatgatgcacccaccttggcctcccaaagtgctggaattacaggcgtgagtcaccatgcctgaccaacttgcaatgtttaaaagttgatttgctgcttgctttggctcttgtccattagaagctaagctccacgaggacaggagctcccttccctgagtgttgtggtgtgcccagccccaagcacaatgcttgggacatagaagacacttagaatggagaactatccaccaaattctcccctctgtcccactgaacaaacagcactgtttcccagagaggtggaaggataacaagtgggaacttatctggctgagactggtagcagctgtagatttgtgaagaagggggcagcctgtttacattcgcttatttatttatttatttatttattgagactgagtctcactctgttgcccaggcttgagtgtagtggcttgatctcggctcactgcaacctctgcctcccagctcaagcgattctagtgcctcagcttcccgagtagccgggactacaggtgtgagccaccacgcccggctaagttttgtatttttagtagagatggggtttcactgtgttggacaggctggtctcaaactcctgaccgcaggtgatccaactgcctcggcctcccaaagtgctgggattacaggtgtgaaccactgcacctggctaacattggcttatttttggttctagattgatgctttgcgaactctaacatgcacgggcaatcacttgggatcttgttaagatgcagattctgatgcagtaggtctggagtgtggcttagatttggcatttctaaccagcactcaggtgatgctgatagtgttggctgctttagggggtcacatgtaaagaagcaagggcctggttctcaaatttggctgcatattggaattacctgggacctttacctagaaattctgatgtaattggtctagggtatggcctggttattgtttttattttttaaagtgcacattagtgcagccaagtttgaggacccctgctctggacagtgttttacttcatacataattgtgatcaaataaagacatttgacttgtcagaattcttttcatgaagagcattgcatttttatgacaaaggaaatttccttgacaagcttgcctgagtcacagcagggcctgaaagtgggaagaactcttctgcaaagacaaggtagtgatagggctctgcctaccttagggagaagagggaaggtggaaacagagccgcaagctggtgggtaataaatggaggaaggcctcctgctccttccccttaaatcttcagaaagttaaatagtgaaatgcttgaaaataatggaatttattttaaaggatgccagtgaaagcagtagcagttcccaggcatacttgcagattttaattgcttttaagttcttacaaaaattccaaattagctcaaaatctcagggtaggacacaggccccagaacttgctgaagctcacctgcagattccaacatgcaggcatgtttgggaacccctgggttcagatgagcctcctgcaacccaggcagatgaatgcagggtgcaaaggcagagagaagccagtgtgaggcattgcaggaattccccaaatgcagagaatgttctggactctaagcttatgaaatcaggattcgaattcaagtggaaccagaactccaagccaggagggtcccagccaacaaccgctaaggaggcacttggtttgagagaatggcttcattaagcctgtttccttctctgttaaatgggaataataacacctgtgactaagaaatgttttgaggaacagaggagaagatgtggatagatttgctttgttatgtgctgtatagagaggcagctccatatagctctttgaacgtggtttgctactttacagggcacagcttttgatagaaagggatagtggagaataatttgtgaatctagggtgggaagtatccaccagtacaggaaagagaggcactggctgaatcgccaccttgtggtggaaacttgagttgcaggagtgggagccagaggcttaaaatgagtagacttaaatcgtaccaagcctagcagggtttctcaccctctgcactgttgatattttgggcaaaataattcttttttgggggatgttttgtgcatggtaggctatttagccgcatctatagccttttcccactagccacacccctcccctgcagctgtgacaaccaaaaatgtccccagacgttgccaaatatcccttcccaggggcagaattcctcctggttgaaaaccagggtgctatagaaaacgtcaaacaacaacaataacaacaataataatatcttctagcagtttttgagtgcttaatatttctagtgctttgcctaacatgctaaccactttacatctattgatttctttgatcctcacaacatctccccatctccaatttgaggaagctggccgggcatggtggctcatgcctgtaatcccagcactctgggaggccgaggtgggtggatcacctgaggtcaggagtttgagagcctggccaagaaaccttgtctccactaaaaatacaaaaattagctgggtatggtggtgcatgcctggaatcccacctactcaggaggctaaggcaggagaatcgcttgagcccatgaggtggaggttgcagtgagaccagattgcgccactgcactccagccttggtggcagagtgagattctgtctcaaaaaacaaacaaacaaaaaaaaactgaagctggagaggtcatactttcctgggatgttcccatgcttagagaaattgatggagcttagtctggagtagagggtgtctggagaccaaaatctatattagtttcctaacgttgtaaaaaaatcacagtaaacttagtagcttagaacaacaccaatgtattatcttacagttctggaggtcagaattccaaagtgggtcttatgggctaaaatcagggtgtcatagggctgtgttccttctggaggctctagagaagaatctgtttccttctctattttagtgtctagagccttcctttgcccatgcccctccatccatcttcaaagcacatcattccaacctctgcttccgcagtcatgtcttcagacctatgtgggctgcgtgtctgagggaggcagccccttcctggagccctggagagccttgctgagaagaattcgaggatcttacaggaggcagatattagctgatactgagaagagatttctaaaaagcattcttgcccagggctaggctgggttgtgtagggatttgaccatgggagggagtagctgagatggatgaaggtggaggtccctggagatggggaggtaggggatgcctgacagccaggatgatggatgggttgtctaggtgcaaggcgactctcttaggacgatgctggctattgggtgaacaggagcctgagcagtggccaaagtcttcagtgtgtgaggggatgtggccaggaggtcagaggctgggagagacaaggagagaagggtggtagatggggccagctgcatgggcgtgctgccagggcagtcccacaggcttggaagagccccgtgcttcatggtcgctgtcttgaaattcttcacgattttatacttgaatttgtgttacaatggagagtgtgtgcctctgcctgtcattgcctccccagggcaggcacccacaccctcaccccctgccacttggtcctgttctgatgcacactttttttcctattgactgaatgatgcacactttaaaactgggtaattgagagcagtttaatgaaggggccatttatattcatgtaggcagagggagggagtcacaagggatgaggtggtgtcccgagctagcagctgtagggagcctttagcatctccaggcaaagaggcaaggggctggtggttaccagcactcagagcgggagttgtgtggagagagctccttgggtagagggacacagccaacccatggtcacccacagggaccctgcagagcaggagccagaggatgagtcctcagcctcatcctccctccttcaggtctcctgccagtgctgtctagttcaaccaggagccagagggcaggcggtccataggtcatcctctccggccacctagcagtgggaggaggctcttgagtggacctggaggggccagggggctactggtgggggtggaaaattctgaagagagtcaggttggggggacgtgcccagtttaggcctggcctggtgattcgaggtgcatggagaagtctgggaaaagctggagtcaggatgggagggccttcagcattttggtcgggtccctaccagccttgcacacccaggttggagcagacccagatgtggaggggggcttgggagcctttgcaagtctgttctgtaaaactcactttccattttgcccgggaggagcagctgctggctgggaaaggcttaccctgaccccaaccacctgctcccttttcccagtcagggctttcgccccagccccaaccccgggggtgggtagttttgtctttcccttggcccctggctggcctggccagcaacagctctgtctcctgctgtcaggccaccagaatgtgacaagtggcagatgggcctctgatcaatggaccccatccccaagcaaggacagtggggctgggggcagggtggggagcggccgctaatggatgggcctgagagcagtgacggatgggcagaaagaagctgccatttgtcttggaagtgagtgactccagggaggaggagaagggagggtggctgttgggctccagggtggagagaaagcaaccggagccaaagcccagcagggctgggaggatggggcctgagggtgccctggatgggatgggattgggagaaaggtttttcctacctacctttaactagagctcttcagtcctagccaagagggtcctgacatgttgagtggaagatccaggggcatcctgtaaaaatggaaactagatcatgctctcacctgggtctcattcagggtgaagtcctatccttgcatgattctcctttaagaccctccacggtcttcctcaccttctccttttcctccctgacctcacctctcattaccctcctcgctcatgcctctcaagacaatttactttcttgttcttaaaggtctctaggcctttgccccagcagtcccctctacctggaatgctctttccccagatatcggcacagtatttattttttgagacagaatctcactgtgtcacccaggctggagtgcagtggagcagtcttggctcactgaaacatctacctcctgggttcaagcgattctcatgcctcagcctcttgagtagctgggattacaggcgtgggccatcacacctggttaatttttgtattttttgtagagatggggtttcaccatgctggccaggctggtcttgaactcctggcctcaagtgatccacccacctcgggctcccaaagtgctgggattacagttgtgaggcaccacgcttgggaggatatctgcacagtattcttatgtcctgaaggtcaggtgtcagggcagccttccctgggcactccttataaacagcaatgtctccctgccccatgaccccgtctccatctggtatacattatcactccacctctgccttgttattttaaaattattttgtaacagccaccatctgaaatgtcatttatttgtttactgtctaaggtctgtctcttccactagattgtagattccatgaggacagggcgttgtctcttctctttgctgctctatttccagagcttagaatagcactcagatgggctcaacaaatacttgttgcatgcatgaatgaaagggttctaactccagttttgatgcttcctggctttgtgagtttgaaccatctcctgagcctcagcgtcctcatttgcaaagggagggggactgtccttcttcccagagcccctgtgaggattatgcaagacaatgtgcatcagccaatgcccatattttagagaagtctagaaggcctgggacttgttgaggttggaaaagaaaactgcctcatatctccattcatccagccagtaacaaattctcaaagtaagataagacctgggtctaaggataaaattaaggatgttgctgtaagaccccttgttaaaccctctgaaagacttaaggtggtactagcagaccctttagctagacactgtggtttctaagactcttaagggtccaacaggagggaagaagagaaagagaagcctgtttcaactgaaatgaacctcagtcagatgcatagaaaacccataacattttcaagatatctgtatcagtgaaaacactgtaagtgtgtacaaaaagtgactgcaacttttcaaaataaaaacaggcctctgagtctccaattttctaagagcagaaaggctgaaaaaaactatgtagctataaatatcagccatttcttatgcaaacagaaggatgattaggagaggagaaccaagagtccagagaggaaagttaagagccatagagaacaatggactagggaatcactccaaggaagcagaattggacccgaatcaagggctgttccctgcccctggaagcagagggaattgacaacctgtgctttgctggattttgatgtttctatgaaccagggaccactaagtacctccggttcctcccctttttgtctgggaatgcctattgcgaatatcctgtccctttttcatctttatttatttatgtttgagacagagtttcgctctgttgccaaggctggagtgcagtagtgcaatctcagttcactataacctctgcctcctgggttacagtggttcttgtgcctcagcctcctcagtagctgggattacaggcaggcaccagcacgcccagctaatttttgtgttttcagtagagttttctccatgttggccagactggtcttgtactcctggcctcaagcgatccacccaccttggccttccaaagtgctaggattacaggcaggagccacactgcatccggccctctttttcatctttatatgttgagtatgggggtgagtagtaggagctgcaccttatgaagcccatctgcctctgtccctgattcagaagtgctatcaactgaattgtctcttcccaaagtcataggttgaagctgtaaccctcaatgtgactgtatttggagttaggccttttaggaggtagttgaggttaataaggtcataatagtggggtcttaatctaatagtattggtggccttagaagaggaagagagaaatctctcccttgcttcatggacacgaaccaaggagggccatgtgaggacacagcaagaaggtggctgtctgcaagccaggaaatgagccctcactagaacctgaccatgctggcacctggatcttggactgcaagctccagaactgagaaaataaatttctcttgtttaagccccccagtctatggtattttgttacggcagcctgagctaagacaagaactcaaggttctgaacatgaagctataatggcatgagacattttgtgggaggggagaatgagcatattttgaatgtggaagaaatgaaagtaattgtagcagagagtggaccaaaataagcttaaaaacatggccacaatattttttagtcccttccattaaaaaatagtctactttcctaagctgccttgtcatctgcattgacatgcagaatgtggtggaagtgatatcagtaagctctagagtgtggcaaaatgttaaaaacaacccaaatggccatcatcagggggctggctaaataaacaatgatgcatctatatctggaatgcctcagcactaaaacaatgcctcagagcattaaaaacaatgaagtggatctgtttctatcaagatggtagtatctccaagacatatggtcaagttatgaaaacaagttgctgaatgataacttcaagtaagataccatttatgttaaaatataagttcatgaaaagataccatatatagttgtcccttggtatccacagggtattggctccaggataccccttggattctaaaatcaatggatgctgaagtctctgatataaaatggcatagtatttgcatacaacatatgaacatccttttgtgtactttttttttttttttttttttgagacagagtcttgctctgttgcccaggccggagtgcagtggtacaatctcggctcactgcatcttctgcctcccggattcaagcgattctcctgcctcagcctcctgagtagctgggattacagatgtgtgccgtcatgcctggctaatttttgtatttttagtagagactggggtttcaccatgttgccaggctggtcttgaactcctgacctcaggtgatctgcctgccttggcctcccaaggtgctgggattacaggcatgagctaccgtgcccagcccttttgtatacttttaataatttctaggttacttataatacctaatacaatgtaaattctatataaataattgttatactatttatattatttataatttttattatttatatttatatgatttatattttaattttgcattgttattttgtattttttctgaatttattcagtcagtggctggtcgaatccatgggtgtggagtccaaagatatggaaggctgactgtattttcctgtacatagtgagtgtgtgtgtttttatgtttgtgcctgcacacatacactcgtgtgtgcgtaagatcattagaataaaataataagttctactcaataaccccttccagaatctggcctggggttgacattattctccctggcccttggttagtggaaaccacagcttcttctcctctgagggtgcttcccttgagtctagggtgattcctttatggccctgggtgctgtcattggttcttcctgccaccatggctgccagttccttctccttactgtcccttctccctctgcagctggaagatcattctcgttgatccagaaggcacaggtgctcccaagctgtggcgtgtgtgggtccctgctatccgtcattggcaggacttcagcgtcagcctaggcctccattccttaggagcttcttgccattgtgtcactaaaatgtcacattgtcttgtcctgagccgttcttgtgaggagccagtgcaatgcagaggggaacagaataataggattggccctttttatggccctacagctagctgtgcaacctcaggccagccacttaatattccccagcaaatcttgctttttatgaaatggggacaggagtgtcttgctcctagggagcaaatgtgataatgcaggtaaagtgccccatgcaatggcaggcgtgctgcaggtgcttgcaaaaggattttccctttctgcccctaattccagtgtggctgtaaatcccttcatagctgtgtggctttgggcaagtcacttaacctttctgaaccatacctgtcaaatggtgataatgacatctcccctacaatgttcattcattcattgagcaaatatttatcaaggacctagtacgggctgggcatcatgctaagcattagggatatagtgacggatgagactgatgaagtctgtgatttgatgttgacgattgcctagtgagaaagagaaataaaacaaatgactgtatcgataattgtcatgagcttggagttgaagcaataaaatatgttgtacccagtaggtgcttcaggaaggcagccacccatcacctactgcagtcccagccacaactgggctgcatgaaaccactactggagccccagcagagagctcacttccaccaccctgcctgtggggctcagctcagcaatgctctggcatcttctatattgtcctgtgtgatttctcagaagaggtagactgtcccaaaggccagagcactgctgctgtctgagcagccaagatgccgaagcttcatctcaaactttcattatcctttgccttgggctgtcctgttttcctctcccctcccccctcctttttccttccttctttttcttaagactaggtcccattctgttgctcaggctggagtgcagtggtgccatttcagctcactgcaatctctgtctcctgggttcaagcgatcctcccacctcagctccccagtagctggtactacaggtttgtgccatcatgctcagctaatcgtggtattttttttatagagacatggttttgccatgtttcccgggctggtctcaaactcctgagctcaaacaatccacccccctcaacctctgaaagtgctgggattacaggcatgagccattgcacctggcctgttctgtttcttggtggggaattaattccattctttctaggatttttttttttttttttaaatcttccttgctaaaccagagcatgggggaggctcccagggacccctcattcactatcattcagagtagcaataaccatccattaagcatgatgctatgccagggcactttaccctcatgaactctttgaatctcacagcagccctgacaatattataattctcattttacagagaagaaaatggagaaacaaagaggttggttaaagtgccacagccacacggttggtggctgtgtttgaattcaaacctggacacctgttgccattctgagggtgttctgtaataacatgcctgaatcagagttgggaagatggagcatgggatgaggacaaaggagagaagtccagaggctggctagagatggtaagagtccagagacaagaccctggtgttgctgtcctcagcctcttttgagaagttcctgttatctttaggggaagacaggaggggatggagaagagaatttctgggagacctcttgaatgtttcagttccaagacagtacctgagaagtccactgtgaacagttgcccacgttgtggactccacagctctagatgacaccattcacactgttgtcaatgagaatagactgtttaggtaccctgtagggacatgcattttgcatcctgtgtcataagaggacttctaagcggtactggctagaatgctgcggggacagggagaacctttctcaccttagaacagggtccctgggctcctgctggggagaaagatcagaaagggacagtccacagcaggccattgagtctactgggaagaatgagatgggagatatgggcactgtctctcctagccagcttttctgggtctctttaccctattcagacacacctggtggtctcaccctctgctccccatacatgaggctgaggtccctgcacacccaaccctggaattggagctggagctcaccctccctgcagggatgccggctttcagggccctgcctccagtccagtactgtgagtagcttctctgtccgctctcctggatggcttcttctggggacagcttggggccctaacttgcccatttcccagaatccttcctgcaaccaacttgagagttaaggtagctcagggtggttaaaggttaatgtctgcccagccatttatctgctttgaattgacttatccctaagagtgtggctctttaaaatgcaggagagtgttggagccaccaaactctctcattgcccagtgtcctcccccacccacccccctgtataaatccccagtccccctccccttccttgtcaggaaccgatttcagcccacaatggagatggtttattacagctcacttcctgctgtgagtaaataagtttgtctcctttaaattccctgggcaattaggagaatgaaagactgagctttggattagcatttatttcctccaaacgtttatatgaggccattttcccactgacaaattgtggggcaaattgttctcgagaaactgtctgcagcaaaggtgctatgattaaacggccggtgtaaatttggggtcataaatcctttccctgagttaatgggatttattcacagcaactgccattacaggctcaaagaaataataataaatgaggttgattttgcacctgtttcagggtaattaatatgcacactaaagggaaaagaggttgtttttacaaactgcctcgcctgtggctcaagatttggagtccttctggagtcttcaggtcaatggccagcctctttcaggacagagagctgggagcagttgggaaggggcttgaggcagggagagggtggtctggggtgtgacctgagactcttgcgttgcaggtaacggaacctcctcacgctggcttgagtagtagggtttgatatgagggcaagggggtgagtaagacattcatgaaactcaagtgtggtaatgttatactgaatacattggttgcaagtgacagaaacccaagacagctgaactcctaggactgaaggaagtgttccaggaaccccgggccccagggattggaatggagactcgggaccaccaagtctttctctcttgttctctttcctctctttctctctcatctctgtttctctttgttcttccagagttgacgccaaagttctcctagatggaaggtcaaagtgcaaaaccctcttacattctctagtctccctcacatgggataaagggggtggtggttattcctgaggcaccctggaggggcccagcccttccagaccccacttcaagctcatcctggccagaaggcctccccctcctctcaaggaagccactcaccttataccatccccactactggcaccactgcctgccattttgtccctatgcccaggtgacctgtcttctgctcacagagcttgcccagctctccagccccagtgttgcagcccaggatccctccccagccctggtcggaccgctccctgggaaccctgaccctgtgactccagctactgcctgcagtattgttcccaatggattccccctgaatcctgggatctgagctacactcaggtggggcctccttggaggggcatttggacactggacttctgattcgaagcaagatctgatcccctctgcctgtttctgttctgtctggtcccgttctcctctccactccctagggagggcctgggcagttgaggtcctaaggggcttctcactagaccctcataggacagcagctagagcaatctgtccaaactcaaattcaaccgccctgttttcctgagaggcagtggaagtacagtgattatgagcttgggccctggagctcgcatgcctggctttgaatcccagctcactgcttcctcgctgtctgatcctggccaaatcctttcacctcttggaggcttggtttcttcctcctctatgagatgaagatgacagcagtgcccagcttgcctgtttttttaaagtgtaagtgagatggattttaggcctatgccttggaagaaggagaagggaatggtgaaggagcggaagtgggagtgtctctgatccttgaagccttactagaaagacaggataactggctaacttggattcagcccctgcttctagaagctccttaggaagtctggagagtggctgatccatcctggggcagctagagaagcactcatggaagagaggacatagaagatggggtgttgtgggtgaataggagttcttcaggtagagccagggagaaaggacattattcctggcagagaacagctcatgcaaagtagtagagaaagagcatactatgtgttcagggaatgacttggagtcagtgagaggccctagagggatgtgttagttcaaatatgacagaagtatctaattagatcttttccttaaatcaattaaatcagactaacccctatcccccatccattgaattagcaggaaattcaatttcagtcactaccaaggccctgacccttctggggtcccaaatccaggtgcatctggcaaatcttctcatctgtactccatgcagctgccacagctgccatcctgtttatctgagtgcacagaggttcctgaagcccatgaccctctcccacgaggcccaacatctgtgtccaggcgggacatgccagggcctggggtcttgctcagtgcatggtgtggctgcctcttgggtgtctggggaggacaatgagttgtgatgagtcctcactcctgtcttgtctgtgtagcctgggaataattcctcctttttggcctaggccctcttttcctgaccctctggctctgggtcacccctccaagtcttttcagtggctctgagcttactataaaagccaggaagaaaatgggcaaatgctattttttgttctacaagatcccaagagcaagggcattcaaaaggctctgggtacccgttcaaaatgtggagaaagaagagggaacatgcacaaaaatcaatctctaaaaaaattggctgggcatggtggctcacgcctgtaatcccagcactttgggaggccaaggcagatggatcatctgaggtcaggtgtttgagaccagcctggccaacatggcgaaaccttgtctctactaaaaatacaaaaactagccgggtgtggtggtgggcctgtaaactcagctactggggaggctgaggcaggagaatcacttgaagctgggaggcggaggctgcagtgagcagagatcgtaccactgcactccagcctgggtgacacagtgagactctgtctcaagaaacaaaaaacaaattatgctgccatggtatgatgcaggaggatgagtgccgtggtctgaatgctggcattcccctaaattcatatgttgaaccctaatccccaatgtgatggtatgaggagatgaggcctttgggaggtgattaggtcatgagggtggagccctcatgaatgggattagtataaaagaggtcccagagagctgtcttgccccttttaccatgtgaggacacaatgagaagatgccacctaagggccccatttcctggctcatgcctgactccaaatctgccagtgccttgatttgtactccctagcctccacaactgggaaatgaatttctcttgcttataagccacccggtctgtgggatgttgttatagcagcccaaatggactacaacatagcaactgagcagggcatgatagctgaagcctcaatctgcaggggtttaaaagtcaggctatctagcagtgaggacttgacccagctaggggaaccatgtggtcagatatggggcttagaggtggagctgaagaagattctggaaggatcattttagtggcttcgggatattatagtctctgagactgttgatctctggggcaaagacaaagccagggcttaaggtcaaagctcttgaagctaaatcctaaatccctctgtctttctcttgggattatcctgggagaatgctggaataatagagatacccagaggctacttttgccattctgtatctgcaatatgtgttgatgtctcaaatctcctgtattagcttgctagggctgttctaatcaagtacaagagcctgggtggctgaccagagaaatgtatttgtctcacatttctggagtccaaaatcaaggttgtcagcagggttggttccttccgagggccaggagggaaggatctgttcagttccaggcttctctgcttggcttgtaaatggccgtcctccccctgtgtctcttcacctaggctttcctctgtgcatgtctgtgtccatgtttcttcctcttagaaggacaccagtcatattggattagagcccacagcaatgacctcattttagcatggtgacctctgtgaataattttttcttttctttccttttttttttttttttttttttgagacagagtctcgctctgtcaatcaggctggagtgcaatggcgtgatctgtgctcactgacacaaccacctcccaggtttgagtgattctcatgcctcagacccctgagtagctgagattacaggtgtgcaccaccacacctggctacttttttttttttttttgaatttttagtagagacggggtttcaccatgttggccaggctggtctccaactactgacctcaggtgatccgcccacctcagcctcccaaagtgctgggattacaggcatgagccccaccgtgcctgactattttattttattttattttatttttttttcgagacagggtttctgttgcccaggctgagtacagtggtgctatcatggctctctgcagccttggcctcctgggctcaagtgatccccctgcctcactctcctgagtagctgggactaaaggcatgcaccaccacccccagtcaatttttgattttttgtagagacgaggtctcgctatgttacccgggctggtctcgaactcctggatgcaagcaatcctcctgccttggcctcccaaagtgctgagattacaggtgtgagccaccgagttcggcctcaacttctgtaaagattttctctctaaataagatcacattctgaggtactggaggttaggacttcaacctatgaattttgggggatgccattcaactcataggacctccaaacaagcctacaaaatgcagaagtgatgactattttataaatgaggagttccaggttgagagaggtcaggcaacttgctcagggtttcaaagccagcgaggaatagatgggacttaaactctggtctgctgagctgtgctgcagctgggtgggtcccagggcccctgtggaggcagagagctggattcctgctgaagctggaccctgcttgtcccctcccctggatttttcccagggcaggcttcttagcctgctggaagaaggcagggaggggagaggagggatgtcattctgagcatcacttggccaggccttttgtctctctgttcattgcctgaaatgtgcttgcatcttattacccaagctaggtagatttttgcttggctgagctgagatcaaaaagtaatttttctttttgcaacagccaattagaaattcatttattttcacattatggacatttggcaaaaatttctttggcaatttagctccatttatatagtctgcataaagggagacagtgaggctaggagaaaaaaaaaaggcaaggccgcgggcaaaaattaaatgccgaatcatgtattagaaatgagatgtatttactattgtttttgaaaattaatggtgcatttttagcttttataatgtaatttaatgatgcaattcatctaataaaaaagaacacatttcaactcagtcatacagacctactggggcacagggcggaacaccttttccatggaaagggtttggaatgaaatgcttggggcctttctctttttctgtaaggcaaaaaaggaaaagtggtctgtctgtgtctgtctctctgtctctctgtctctctctctctctgtgtgtgtgtgtgtgtgtgtgtgtgtgtgtgtgtgtgttgccatttggagtatcagtgagaatctaataaaaaggacatttttcttttgccatattggtgtttgtgctgtgttatagaaatcagcctttgattctggaatgttagagggtgttggctgccccagcctgctaagccctagatggaaagaccctggtgggtggggaggagaaaatggccttggagctgtgtcgaggttggtcccccctggactctgagggggtgtgggcagactgggcatccctccggaggaattggccacacttgctggatttggaaccctgtgagcctcctgggtccaatgcatctctctctctttcaagtccaagggcctgattttcacttgccattgctcccaattttgaattaaggcaagaacgtccctcttttcgcaaagaggatgactggaagagaaacgagggcagggagggagggggaggcagggagggaggtgaggcaggcaggccctgaccgagctcctagggtgagttgggcacagtggccactgctttgttgcgctcccaccctgccactagaatgtcagctcttgaggatggagtacatttcctgtcttgttcataccgatccccagccccacagtataccatatacactcattagatactttttgactgcagagtggcagataaaccctgggttaaatacattatgtaaatgtctgcttaactctcactccaataccatgagaaggtgggtaccacgactaccttgtttaataggaggggacacattggctcagacaagttagggaactttctgaagttcactcatctgttaagtggcagggctgagacctaacccatgactatctcactcccaagtacttgctcttaaccacaccaatgtatgcagtgaatgaaagaataatgttaagtatgaatgacaggagggctggcctttctgaaggttaccaaaccaaggggctgggatttgaattcaaattttttgattccaagttaagaacttctttctgggctgggcacagtggctcacacctgtaatctcagtactttgggaggctgaggtgtgcagatcacttgagcccaggagtttgagaccagcctgggcaacatggcaaaaccccgtctctacccaaaatacaaaaattagccaggcatggtggcaggtgcctgtaattctagctacttggaagactgaggagggagcatcacttgagcccaggaggttgaggctgtagtgtggaggattgtgccattgcacaccagcctgggcaacaggagcaagactgtcttaaaaacaaaacataaaaacaaaaaactttctgctaccctatgtaccctcagcaggagggaggaagctgtggataggaaaaggagtttggcaggagttcaaggttacagtgagctttgatcgtgccactgcactctagccttggtgacagattgagaccctgtctcttaaaaaaaaataaaaagaaaaggggctttggggcagggggaagatgagggccattagcgtgggaggccaggggacacataggcctaggggtcttccaggcatggcgatccctgagggaggtgaccagggatagggtatatagttatcccaggggtcaaaggaaatgcccaaaccatttgtattcatttgttcagtgattatttactgaacatctatcagatgcctaggactcacctgaccttttgcagcttgaatttcctcacttgtaaaacaaggtgaatccttcaaagtatttcttgacaaggcgcactgttggtgttttgaatggaacaatcttactcctcggtctgaatggcacttccccaccctcccacacacgtggtgttctctgatcatggggagattcctaaatgctcccagataccctcctcgaatggaaacagaggctttgtagggctgctgggaggactcaacaggacaagctgcaggaaggcgctgtgaacagcctggtgcacaggaggcttgtcatgcttcctttgacatctccctttcccttgcctctctccctttctccttcctccagccccacaaatctgctctgagcatcattttgagccattgaccctgctgctacccagccaggctgtcagtcagctccctcctcctgcctccacctccctctgctcccctgtcctcgcagacctgcgcctggctgcagtccctgcacgtgggctcagcagctgtggacattctgccaccccagccaccggccccagcatgacccaggccctgccctgtcactgaaccttggcgggaaggtcagttatttccttcctttttaggaggagagctctgccctttgggtgcctgccctggtgctgtaccagcctcggatctgggatttttgcattttggggctgcctagagaagttgccaagcaggcatggtaaataggcctctgagtgtttggagtctagaactccactgtccgatttggtagccactaactgtatgtgggtcccgagcacttgcaatgtgaattggggtgtgctgtagtgtaaaacacacatggaatttgaaggctctagtgcccttggggtgcaagcagctgagtgtcacacctctttattttattttcttggatttgattcggggtggctgggcactagattggcccaatatcagttacataggatgatcccttcccctgtttgagccatgtaaatccataaacttggatatatcctcaccagactcccagagttgggattctgattgccagccctgtaacaccagagcctcttcacttccaaggagcagagggggcttcaaaagggaacatgcacaccctctccctcttcctaggtcccaggacttctagggaaaccctttccatcccctgatgcccagctgaagagccagggatggggatcgagggcttcttccgtggaatctcagagcacttgacagaccctgtgtgtttcattccagactttttgcccactgcccttcttggcctgagcccctggatggctgcacactgcccgatgcacttttgtgcctccctgggccaggcacaagtctcacacccagtggtgtggttcaaagtgaattgaggttgtcagttctgcagaggcatttttgcaaaggccctgcatggaggtgccaggtatgaaactgatttaaatcacatcctggagcccccaagcaggtaggagctggtggcagaagtttccatgtcttagtacaggtcctctgcctctgacacacatgctgagggacacctatgtggtgattcaagggaatcttgcacccactgggctctgtgctgcatgctttatacacatgtgctcacattatcttctcaacaactgtacttggtaaggctacaatgatcctcactttgcagatgagaaattgagctcccgagaggttataaaaaactggctgaagtcacacagctggcaagaggcaaaactagtattggtcctcaagttgtgtgaccctagaaccacaatatagcaattctgcttctcacaggtacacatgtacagacccaaagacacatggaaatacaaagacataggtatacatagatgaacatgcatatataaaatgcagagatccatatagatatgcggacagacatatatggacatacccacgttcccatggctactcagatataaaaatactcctatccatgtacccacattcatacctccatgtatactatgcacatacctatgcatacacctcatatacaaatatacacatggctactctgacataaaggtatacacacatgcacacactacacatatttgcacttggacatgaccacaaatatgcagagttgaaagtcccccctcctaccacacacacaagcatatagtgaggcttgtatacccagatatttaactcctgcagaaacacacacacacacacacacacacacaatcttgacacacttctaagaacgcctgcccccaggtatacagaacagcccctcccccagtatacactcacaggcactcactcaagcccaatgatccaatttaaactgaaaagggaaaaccaagttgaaaattagaggggaaaaaaaaagtccttcagaaagtataaagctaataggctgcaagtggtgagcctgctgccttcacgatatcaataactcagtattggatttccaaaaagacatcacataatttttcaatgagaaatccatgagccctggagatgctgttatggtgtgaattacaatgcacacgcttgtcagccgtccccgtcagcactttctcggatgccttaacgggcaggaagtgctgtggctgcagcagggatggttattgttattatttcttccttttggagcctcaaattaagaacctgggaagccagcaggtccctttctcctccctcccctcctccaattgtacccaaatcaagaagttttcctgcttgatatattctttagtgtattcttcagctctcagcctcccctcccctgtcctggagccctaattctgggagagactgacacctggggcttaggaactagggtcaggatacgtgggtgggggccaccctctctatggagctcgggcttgtttaagacttccttgagtgttgtggaaatgataaaaactgcttttccatttccgtcacttggacccagggattttttattgagcagaatcagcctattgggcattgctttctcctgaggttgccttcggggcaggactttggttcagtaagaagagcaggggtccctgggagggatgtcaggaatgatctggacagagggcatagggcatctttcctgagcatatttaggaggaatttgggtggccaagagaaaggatctgagcagaccacccaggagtaggaaaagggggcttgggcactaggggtggggttggggtggattgtggaaattgttttattcagctcaactctcctgggcttttcccattcaccatgaaaagaagatcctccaattagtcactggtcccagagtgtgagccccatggaacatacctgaaagtgacctgcagtcaggagcaaagccagtcctgctgactgcagacccacgagtattgtataccgttgagccacttggggctgtttgttatgcagcattatgaaacagaaatctgaggagcacagggacttctccgtaccttcatgactccctgggctgagcccactgtagcactgtggctcgtggtctagaatcacctctgtctctaactagtatgaggtttaggggttaagagtggaatcccagtctctgggttcaaattctggttttgattatagtattggataagtcatttaactcctttttgtgtcactgcccatttcatagtctcccgtttctccatgcatcattcgggtggggaccagaggcacctagccctcaaatcaggaaaagggtgactccttccctggcagccatccctccagcctgctcaacagccagactccagcttcacatgcctttttgtgcctccaggccatcggtcaggttgtccccttcctgaagcttccttctcaccctgacagcttctccagatcccttgaggcctggattcaaatgtcacctcttttccctgagcatcctgaagcagatgacagttgcccaaacctctccttgtcactcctggattgtgctgtgctgtggttatttgcttgttgccttcaggcctgggatgggctgggactgatcagttgaccctctggcttcttgccagagtttttagcaggagacacacagcatcctgtaccctccgtctcttcctcccctactgagacttgatgcacccctcaccaagggaaggtgaactgatcctgcctgctaagttgctcagtacataattacatacctatcacggcatggggcttttcggtgtacttatcccagccctgatctccagggtgggtatgcgggatggaggcagggaagaagtgctgagcccttgcctgtgggaaggaagaggagggtgatgtcaggaggcagcaaggccctgaggaggagggatggggggtcacctgctgggtgagctggcctggggttccctgggagcttgggcccttcattaacagtttgaggcacggagacctcaggtctggacttcttccaccactgactcacttcttgtctggcttgaagtctacattcaaatatgttgtttcctttccctgagcatcccaagcagatattagccctgcacctgaagctcccaagttccctccatatcttggtgacactcaagtaccatactctgaaatggcggggtgggatggggggcatcaaaagacactagaactttgatttccagttttctacattccataggcaagtaaaataaaacaaatgaaatacccagaggagatacccttatgtaaagagcaggccatatcttttctaagtaatgatgtataaaacagctgtcttcttttattattactatttcacaaaagaaagaatagtttaatagtaaaaactgggagaaagatatggtctcagaattaagcttctcccaagaaaggagagggagcaatggtgcacaaatgtgaatatcatctatattgtggagaagatgttagagcaaaagagaaattgctaaagtattcaacagagaaatatcaaatgcccctaaataaaatgtatagattggaggaagaaattttcagtgtgtgcagaaacgatgatgatgatgatgaggatgaggatgatggaggtgatgatggtaaggacgatgatgatgaagatggggtggtgatgatgaaggtggacatggtgatgatgatggtgatgaagatggaaatggtggtggtaattatggcgatgaagatgttggtggctgtggtgatgatggtgctggagatggcgatggtgatggtgctgatggtgatgatcatggagatggtgatggtgttaatgatggtgctggagatgacagtggcaatgctgatgatggcaatggtgatggtgatgatgtctgacctttgttgagctcctactgggtaataggtactgtactccatggattatcttatttaagacttaaccccatgtattatattcctgaagccgctgcaacaaattaccacaaactaggtgatgtaagacaacagcaatttattctcttatagttctggagaccagaagtctgaaatcaactctgggctgcactccctctggaggctgtagggaagaatgcttccttgcctcttcagcttctggtggctgccaacattccttggcttccttggcttgtggccacatcacttcaatttcagtctcccttttcacactgccttctcctttgtgtatgtcctcttctgacttatataaggacatttgtctctggatttagagcttattcaagtagtctgtggtgatctcatctcaatatctttagcttaatttcatctgccaaggtcttttctccaaaaataagataatattcacaggttccagggacatggacatatcttttttttgaggggtcactgttcaacccactgtatcccattttataggcaaggaagctggatgtcagattctttaaactaggtaaaagttgtacaatgatcaaatggcaaagaaagaatctgaatctgactctagagccttgggacttcatccttatggagacagggtaaagaagagaggctgtgtggaacatttacctcccatctgtgtgtgggggagaggaggtgcttcaaggccatgtcaagctcttcaaggccatgtgatgtaggagggctggatttggtcttaggtaacaggctccaaggtttagagccagcaggtcacaagcagaggaggtaggggttcggggggtgggggtagttagagaaagggcagatccatgatttgggggacttcttagggagcagaattacagagtgtatgatcatgtcaccaagcccagatgagagatggcttagaggagagcagattatagaaatcgagatggaaaatggggaagggataaaaatgagtcaatttggtctaaaagcagtggacaaagaatccataatgtatgaggaagtaagtagatatctacccatgtgtcatttataaattctttctataacagagcacctacctggatcacatgaaaggatgctaaaatttacagaaacaggtaaagaggcatattttgggggtaaagaacagcaatattcatttgctctgtgggacattgctcacatttactcacagtagcttcctgtgaatacttacctgtctcctgtgagatcttatgggggcagggtgggcagagtcaacttagacatgttgaaagctgtccacacttcttccctctggggctggaaacctcagcttgagaaggaaaggagagagctgggtttataacatcttgggatggttcaagaaggagctcacgcctgtcttatgcccagggcaggtgtgatctcttctgggtgtctccctagagactcagttccgcctttggggaaataagatgtcaatgccatggggcatatgtgccttgtccatgaggcatgggtgccctgtccatggaacacaggcactctgtccatggggcataggagccctgtccgtgggacacaggcaccctgtccatggggcataggagtcctgtctgtgggacacaggcaccctgtccgtggggcatagtgaccttgtccagggggtgatgctgtattcgccttgtcttcaaggattctgatgcctaccacagcagactgcagactttcgtttcagctgaaacgtctctacctttatgtgttggttttcacataagaatttatttaagacaagagatgaacaaagtttccagagtacagcatgataatgatctgtctgggaatacttatttttcctgcgtgaccccaggcagacctagggcctatccagtgtggtcacatatagttacaaaggccatgccctaatagcccctggggttccccttcacatgtcagcaatgtgaactgcaccaccaagagatgtgaagtgtgctggtcctggatctgcctctagctttgactgtgcaccccggggtccccaggcttggtgctccctctagtggcagggtagttgtggtctgtaagctctcagtcttgtgatgccatcaggagctccagaactgggaacaagttttggggagcctgcatccctggtctgacttgagcattcatgagttcatgcccgtaataaatactgagcgccttactgtgtgctggcattgtgcttatcacaagaagaaaagatccctccctcccgaaggagcatctaatctactgggagaaacagactatgaggaagaacacgaataaatgtgtgattaagatttgtgaccaatgctatgaagaaaacaaatagagtgctgacatagagacaaggggtgggggtgacaactgagacagaggcattaggggaggcctctctggaaggtgacctttgagctgagatctgagggatgaggtgattgcatgagaagaggtaggtaagagtgtcctaagcagaaggaacagtgagtgccaaggccctgggacagaagagggcattgcatgtccaaggagccacaggaagcccattatggttggagggtcatgggtaggagggcctgaagcttcagaagacatccagatgaggctgcagtcaggtggatgcaggcatccagatgaaccctcgtgctctgtctctgaatccctaccagtggaaccgagtgtgaggagttaggggttagcagagtgttagagggagcctagagaggagggctcttaacatttccagggaattaccaaatgtctcccactgagctgaggagattctgggccgtctccaaaagtatattccagaagggaagctaccttaacattagttaaggtaattctatttcctgtaacagaaccccccgccagatctcagtcacttaatatcctagaagtctaattctcacattaagtccactttggtgtttggcaggtgactttctctgtggtgatgcagggacccaggcacccgccatcttttagctctgccatctcttaggatcttggagtccttcccttccatctggcgagcagtgaaaacagcatgtagagctttgcacaggaggtttttgtggactgggtttagatgtgtctatgacttgcatttgggtgtggccaagtaatccagttactgaattactgggaaacagaatctacatggatgccctccaggtagaggaattgggtgctggtgaacacacagtcatctctgccccaggcctctctttgagtgacagcaacagtatggaccagaagctttgtgctgtggcttcacattcaagccacttgggcggctgccagcctcctatcccaactgattaaatcagattccccgggaatggggcctgggcatctgtattgttgaaagcaccccaggacgttgcagcacacagctgaggttcaggaccaccctgaatggtggagagaggagcttctgggacagcagtcacagctgggcccatccttcttcctgctcaataatcatcattatgccttattatcttcttaccaggtgacaggctagagtggcaggaaggaagacaaaagaagttatttacaaataaaatggtcggtcttccgcattctagggcaggggctgccttcatctcaaatgtgggaggctctttggcagtgggcaacaactttaatggctcctcatggttgagacaggtgaaccttaccttggcaggtctagatggtgagagcaggagaaatagataactccattgttcagcttgggtagaattatgagattcccaggaaataatgtgagaaagagaaggtaagtgttccatgttaaaagagtagaaggaagatgtcagagagtgggtcgggggtagggagacagagagcaagagcgagtgagagacagagagattgagtctatggtaagcagtcatggctcatggaaagaggggacaatgagaaattccctgtggcaggaatgaccaatatactcctaggaagtatcgtgtccagcattaaatttgaagttgttctttgttctataattgttttcctacccataaacgtttaataagtctcctatgtacaacagccttgtattaatgaagtcttgaaggactgaaggaaggaagaagtgtgcaagttagagttcttatttagcttcaggcagggaaaaatggaaaaatggattctgactaagcagcagaggaatttattattgggtaagccagtgacactgtgacacagggactcatacaagtcacccttcaaccactgggtggatgtggctggcctttagataacctcttactcggtctcttcaaaacatctctttccttccgtccttctgatatgatgcgcaagagcagatgagggcagggatggcaaacgtgagcccttctacttcatccttggcagacatcactaactgatctctgtgcaagttcttatggagctcaggggcagctccctggaccctttatatttcctgttccgggcagtcattactaacagatcacagatgatatgtgaaatacaatttacttctgttccagggtccatatgacacctctttcaaggcaatgtgtgtgcaatttaaatgacactatctgtctctcagcccaaagcagctgaggattccatgtcccagggacaaagagttgcccatcctgggggcccactgctacggatcttgcagaaactcaaaggctgccattcattcttgggatgctagtcttggggcagagcgggaagacaactcgcttgggtgttacaacctcctgaccccagcttcctttggaatgtggcaccccaagcctgcctctcctgactcccagtctgtgggttccactctgctctgatttcatgatgcatcctgacttcatgggttctaaaaacaattatttgctagctttgtgcccaccccttactttcaatcaggcccagggtggcagagagtcatggggctgccagttttggccaggctggactggggaggggatcggctacccctaaaggaaaagctcttccagccaggaattgcctttctcttcctaatgtgagataattggtttcctttttacctagttcctccacagccttcgtaattactgccaaacccttgtccctcgactttggcattcccaccaatggacttttttccaaagggaaagagaaaaaggcaagaagactcagaatgaaggcctgggctggatttacctcctgagtcatcacctactctctgtgtgaccttgggcacgttactcacttctctaaattgtcctccctaactaacagcttcctgctggaattttgagaggatgaggtgatttaaatgcttagctcaatagcgcatggtgtggctaaacactcgggtgaatactagtattgtttcttgttacctttgtgcctggtggtttgggctggggtgtgagggtcaggctttggggtgctggttggggacttgtgccttctctttttctttccccaaagcttctggaactaagctctccctcatctcttcaaggaagatgtgacaccaagtgtgttttagcagaaacaagacccatataagtgatccactgaggggccagcaggctaatatgatgttctgaaaaggggcattttattttgtcaaattgctctggggctgctgaactttggtggctgtttcttggcagtgtttctggacatcttgttcgcaggtgatgagaggaagggctgccctgacatcttgtacaggtgagggggctggaggcttccttcctgcgcgttccagccagtgccccgcctgcagtgggggagacattttttcacccggttcaatgtgcgggaggaggagggtgaggtgggggcatgggtagaggggccagtgggaggagtcccccccacagagtcctctgttagaacaacccagaagtccccctccccagcttggggagcctccagggcccgttcccaccccagcagccccctccccagctgggggaggctccagggcctgttcccaccccagcagccccctccccagctgcgggagcctccagggtatgttcgcaccccagcagccccctcctcagctgggggagcctccagggccggttccaccccggcagccccctccccagctgggggagcctccagggtctgttcccaccccagcagcgtctaggctcgcttcctgtctccccgttttcttaaaagctgtgtgtcagcacaggagtggcaggtgtgttaactcccggagcctgcgcctgtgccccagcatgggaagaaaaatgccgactcggagagaatcagagtcaggcgctggcactagccttgggggcaggagagagttggtcgaaaggaagtgttgggagaaggccaggtggctggtactgaggtacccacgcctgcttcctctgccaggaagagagaccccccactaaggtaactgtgagaagtagggcactgtctccctccctccctccctccctctttccctctttccctttttttcctttcttccttccctcgtttcctcccattttccccctccctatttccattccttttttcctttcctccctccctccctccctccctcccttccttccttccccctttctctccctctcttccttcctttttgccctctgtcctttttcccttcggtccttccttttttgttcatttctgcactccccctcctccccttcctttccttctctcctcttctcttcctttccctctctcctattctctcccttcctcctttccccctcttccttctctcccacctcccttccttcctgttttcctcatttgcatccctgcttcccctgtgctctccctcctgtcctccctcctcttttcttgtctctttcctttctcttccccttcttcctctctcctcttccttcctccctgctcgcaccatgccactcaatgctccaagctggacacagctgcagggaaatagcctcagccctggcccccaggagcttccacctagtgggagccaggcaggtggacaggtgatgatcctgtcacgtgatccacatgctaatgaagatctgggctggtctcctgggagctttgctgggtctggaggggtagagaaagccctcacagagcaggagacctctggcctgggtctgatagtttctctggctgagtcaaaagaaaggggcattgtaggcagagggaagagcttgcacaaagtagggggacatggtcaatgaattcttatgcaaatttggaattggacaagcctaggcttgagccactgtcagtataacctctgcccaatcatttcagcctctctcagcttctcatctgtaaaatggggtatgttagtactcatgatgccctgggatgtttggggaacagaattagctcttgcatctgaaaatatctagcactatgtgtcttatcacattttaccctcatgtcaacctggggggccgggtacaattatatcttaattttacagttctggaaatggtggctcagagaagttgagcagcctgtccaagttcacacagccaggtagattgaagacacaaatgtaggcagcctgattcccaagcccgagtgtttaataacaatctctccaaagtcagcacatacacttggaataaaactaacacatcaggtgcctgctctgtaaaatgaggttgcacaaacctggcaggatgacagggataactctccagagctggaggggccatgggggatgcacttttgatttttatggcttctcagggtcccaccaattgtactgtcttagcctgtgtctggttggtgcaggaaaaaggaggatgggcagtggagcaggaggaagaagggggaggaagagcgagggaggagggtgcattggagggagcaggaagaggaggagagggaggagggagaggggaggaaggaggggggaggaggaggatagagaggagaggaggagggaaaggggaggaggaaggggaggaggaagggggaggggagggagaggagggggaggaagagtgggaggatagaaaacgggaggaggggaaagggaggaggaaaaggggaggaggaggaggggcagggggaggaagaggggaagggaaggaagggaaggagggaggggaagggaaggaggaggaggaactctctgaccctactcccgaatctgattctgtccctcttttccagttccctgcactgaggtgttggaaatccagctttccagtggaggctgcctgggtttccatccttgtagctgtgctttttctgttcctctgggacttttcttcccttgaccccctttctttcaggagctcttggtcttgtctgaacagcttttgtctaagaagcctcacagactgccctgggcaccctttccttctccttgctctggcctctactgtcagtctctcctctctgttctccctctcttcccatccttccaagaaggtgaaccgtgggacttctgaggtctaaagaagggtcctggatagggactttaggagcccagaccggatggtcactggagagggacccttttgtcattatgtagactggccacacgatggctccctgggaccgtcaagcacctgcccagtctcttcagtgggcctctggtcgccctggtgattattctttcccttaaatgttccacacgcacctcttccttatctctgtagctgggcagccaacttctgggtttcctgctcaccctgggtagagagatcccagtcactggggcttgcgttagagaggagtggagtggggagaagagcaggaggggagcagaaagagaagtgaggggcttgccagggggctagtggctgagcagctgtaggaagggacttcgtggagttactgatgggctcagccaccaggagctgggctctggggaatctttaggagtgagaaacagagcctggatgtccattccagggccccaaacacaaggctcacttcctggaagcatgaggactggaggtgacacagaaaaggctggcgtgaacttccagacacctgaggagcaagagctcagagttccagctggaggtggcccggactgcagacttggccatggccagtggtggcccttcccggacatggcttggagctgatggagctgctgtttgggacagcaggatgtggcttgactcgggcactgaaaaacaaggctggcttttatgaaaaacaaacaaaaactcaggtgaccagagtttcacgcatgctcagaaagcagtggcaagttaggattataataataatgttataacaataataatgttataacaataataatgacagtagcaaataaccatctttttgaggatttatggaacatgtcagacactgcttttttttacatgggttgttttgtttacatggattaccccataggggaggtaatagaaggggatttataatgacagtcaaacctgaaaaggagacactttgttttagcacaacaagacccagggtacctgcaggctggagtgtggctttctcatgggctccaggtgattgcagggatggagagagaaactcgtccatttcacttgcagggtacacagggacttgccatcacaacctttttcatttccaaccattttcttcctgttggaaggaatattcctcagctgaagttggatctgatttaataaggcaataaccagagaaatgcatttcaattgattattaagcatttgtttattaggactcagtagctctgacccaaatagctgctaagcagtcattaaacatcaaagaagatgtttctgtttatatattttgtttatttaccgtcatgaacaaacattattgcatcaattaaatgtcgattagggggtctatggtttgaattagattatacacatagtgtcaaatcattttcgtgtctctttctgagatataatctatttttgttttagtatctaaaaggattccatctaagtgttagaagctgtggccggcaggggttacggggtggcttctgagcacttctaaagctgatgtttccttttttggagtttgcagcctggatccctgtgacagcctggaactcctgatccattcctcattgatcattcatgaaggggccatttctctgcgattctttgcttttttgggcattaattttctagaaaacaaaacaacacaacaataactctaacctccatcataaaacccttagatatttatctccaaggcagctaaactgagttgtggaaatgaaattaagttctccattaatgctgcttcaattaagcagcattgaaatcaggaatggtgtgcttgaaagaatatatgattttcctagtcacagtctagaagcattgaaataacatatcttaatatatttttattcaaaaaaattggataattttctaattatatgagacaactatgtgtatttataaaatcacatataaacctgagcttaattttttttaaattgataaaattatatatatttatcatgtacaacatgatatgtatacattgtggaatggtgaagttgagttagcatcctggctttttaagtcagaggagaggggacccgcaggaggaccctggctgaattgggccccatcagacccagaatggaacccccccggtccccagaatttgtcctcctgttgtactcagtgcgttggtggaagcagaactccccatgggaacaggcagacctagattttctggggtgggaggggaaggtaaaggtgcaacaaattgagatttctccctgccctaactcccaacccagcccagaaaagaactttgagtgaggccagcagtggggaggctgagctctggcagcctcaggggtcagtcctgcagggtagcgtgcggggatctggctctagccacatgggggctggcatggatgccatgaggctcagctacccctctccttccaccttgttctttctgggcaggggcagccctccagatcccagtcagggtttatccaggggtaaaggagagaaagaaaggtgagagtgaagaggagagtccaggtgagtgagggaacagcttgaagaggccagccatttgcatattaaagagcctctcggctggatgtggtggctcacgcctgtaatcccaacactttgggaggctgaggtgggtggatcacgaggtcaggagatggagaccatcctggccaacatggtgaaaccccatctctactaaaaatacaaaaattagctgggtgtggtggcacacacctgcaatcccagctactcaggaggctgaggcaggagaattgcttgaacccaggaagcagagattgtagtgaactgtgatcaagccactgcactccagcctgggcaacagagcaagactccatctcatttaaaaaaaaaaaaaggcacctcaagttctctaacgcttctagcccagaagttttcaaactttcttttaaatcaatggaactgttttatcaagtgacatcttatttcagtgaaagtgtagtatatatgaagtttaaacacagttgaagtggtcagtgcagggtgcctctcacttgccccctaagcactccctgccatggtacccagaggcgtttctgcagaaatcctcttactttgtagacgtgctttgaaaaccactgcattagtacactggacagccctgtccttaaaagctagtcgccagcccagcatggacaacagaagaatccctgggaatgagaccttctcaaagtcccaggcccacctatgaacattcagatttcctagatctggatttcacccaagaatgtacttttaacgagagccccaaatgattctaacccagtaggctaggctggaactagggtgaggccagcaagtgcttggaactgcacttacacggccttgagagtgaagcctcctgaaattttatactgtaggcccctcactggcctcactctggttctggcccaggtactaaccatgtgaaaaccaacacccagctacactctggggtttggctgcatacagaagtgctcagatggggcttgaaagaatgaatgaaagccatagagatctgcctcctggtgtcccatgggacagacagcaaagaaaacaggttgtaggcaatattcatagtcatttttattactgctattgttaggaatttattttttgatgcttgtaaggtacaagacacagtgggaaacaatttataaacattctcatctttcacctttgcatcagccatgtaatagttcaatttgtaaatggggaaacgaaagctttgaaaggtgaaagtctcgtccaaattcacactgctagtcgtgatgcctaatattctccatggcttgagctctttacctttctgctgtactgaggataggtatacggcccttccttagcatgggggatgatgttcctaaatgaccctcactaatataatagcatccattatggactgtagtcactgtgtatgtttgcccagcaagcatcctcatctgcttctctgaagcaaatctcactcccaccctggccacaggatcacttgatccaggtctggccaatcagaatcctccattgccctagaccgtgattagtctgggagtagacacggggtctaagtcagaccaatcagatgcctccccaggatttccagttaggagctggagaagctgacttgcctctggggtcactgatctggaaggaggtgaggggttgctcacagccagagctctaggagagaacaaagaagaggaagctggtgacccagtcttgttggcaggtccttcttcagttctatgaggtgcctgagcatgtattgctgtcagctgtggcagaaaatagttttcattttttactttaggctagtttgagttagttttctgtcacttgcaaccaaagaatcctgatgaattcagcatccaacattaacatcacagtccctctactctgagccctgtctgaaccacccgccatcccgctggcatttcacagtggtgtttgtgcctcctttctcctcccctgcagttcatgccttttcacagattggctgaggattctctgaacactattcactcccagaaagttcccaacaccacctgaatgcatttatcttttaaaaattatggtagaatacacacacaacatttatcatcttaaccacttttaagtatatttcagtggtattaagtttattcatactgttatgcaaatcatcaccaaatcctcatccatctccaaaattcatttcatcttacaaaactaaagctctgtacccattaaacaataactcccatcccctgcctaccctcctctctccagcccctggttactaccattctagtttctatctgtgtaaatttgaccattctaagcaactcatataagtggaatcatataatatttgtcctttggtgactggcttatctcacttaacataatgtccccaaggtttgtccatgttgtaacatgtatcagaatttccttcttttttaaggctaaataatgttccattgtatgtatataccatattttgtttatccattgataaacacttggattgcttctgtgtgatagctattgtcaataatgctgcagtgaacatgggtgtgcagatatctctttggcatactgattgaaattacttcggctgtatatccagaaatgggattgctagatcatgtggtaattctagttttaattttttgaggaactgccatactgttttccacagtgactatgccattttacatattttacattcccaccaacagtgtatgagggttctaatttctccacatcctcactaatgccttttttttttttttttttttttttgctagtagacatcctgatgggtgtgaggtagtcctaatgcattcttagtaatgacaattgtatcagttttgctccataaaaactactttaaaatcagaggcttaaaacaaccactatttactcaggtcatgattctcttgagttaggaatatggactgagctcagctgagtggctcttctggtcttggccagacttacccatgtgtctagggcaagctttgtgttgacttgtctaggaagacttcagctgggatgactcattggtgcttcatgccatctctcaccagaaagccaggcttgctcacatgaaggctgggcagagttccaagagaacaaactaaagcattcagtggaagtggcacaacattacttcctctgaattccactggtcaaagcaaatcaccaggccagcccagatttaaagtgtggggaaatctctgtctcttgataggagggtctgcaaaggcaaattgcaaagggatgtggatatgagaagtgaataattacaaccaattttttttttttttgcaaaatctagcataacaacttttcaacaagctttcatgtcagacagaaggaatttgcatttgagatttgctccaatgggctcacccaattcatgagtttcaaaggctgtggttcacacctgcaaaactagactatgctgggaattgtggaatcaaggctaatgcctgataatttcaaatgagaattttttccttctaaaatcagtggatatttctgaataaattgttctttcagtcacgaatcatggaggcaagagcttcaattctccattcatttgccataagcagttgactcaaggacagctctgactgtctagccctgtctattaatgagtgccattatacaattaacttttccatcacctttagaagatgccaagccagactcctcctcaaagcccacagtgaacaggggagcctccacggagctccatagcctgcttagatgttcagaaagtaaaaaccaactgaaagtgaaagacttctaaagctcagagctttcccagtaactggactaatggagagtacagccagatccaaatggttggaactgttgccagggaagtaaagggaagtaggtacctccaagcattttattaacctggtaaatcagtccctggaagcccactgggaaggtttggagcaagtttcctacttcgttattttagtcactgctactgtaatgctgcataacaaaacacctcaaagtcagtggtaaacaacaagcatttatttttctttcttatgggtctgtgggttggctggggttcaggggattttggctgggccaggctggactccagggaggatgtgggattcagatctgttccacagagctttgttctccttggagcagtggctctccagagcatgagcttcccatggagaataggaggagctcagagggcaagtaaaccatctgtgcccacatgaggcttctgcctggtcatgcgtactatcatcctatcagccagtgtgagtcacgtggccaagcaaaacatccatgggggtagagacataagcttctctcccagtgggagagcagtgcaagcactgcaagttacgtggcaaaagttgagatgtataatcttagtatggtggagtaagaattgagactgaaaacagaatctaccatatttacccagagggggttggaggttgaggtattgaggttaaacctatgttgtgtgcaagtgaagttttgtatttatctaggaatgtctgaaagatggctgggctgaatcagcaggggctattgaaatgaggaactgaggattcttaggagagtgagctcctttggggtaatagagaactgggccaaggagcttatccaaataacacaatcccagtccttgaagagaggggcatttctgagtactccatgatggaagtctctgttttttttccctgtatgacccctatccccaccattgactcatgactggtccctggggagagttgattattccaataaaacattgcgagatgttggggcctaagcaccattgctatgagtcccttctgggggaattaaacatggaagagggttttttttttccccccaaatcacaattcttcaccttggggctttgaacccctgtggccctagacatctgcagtgactgtggctggcagcgggtaggaggtggcatactcagtggtggcagaagcggtgtccaagagaagcaattgtaccaggggaagcaatattggtgcccacctatcaggaatggcagggatctggacaggtagggagaggcaagattgaggaacagggaagggtgtcctgcttggagatgtggcctgtaccctgggcacactccaggctcagcacactctctagcacatgcagtggtcccagccatattcaggctaaggcataatgcttaggcagcccttctatacttcaggaatgtgatgggttcatttattcctatcaggccatgacagggtttgcaaacaacctttttaacactgttcctttgttcattaagtatcaagtaccttctctgtgctaggtactatgtaagggatggttgaataggaaacattttctgctttgcaaagctcttcctcttagtgcaaagttgggtaaactatttcctgtgggccaaatatgacccaccatctgtttttgtaaataaagttttattggaatgcagccatgctcatttgtttacatattgtctatagctattttaacactatgatggcagcactgagtagttgtgacagagactctatggcccgtactgcctaaactatttactattggcttgttgtagaaaaagtttgccagtctgttgtctagtggaaaagagaaacataaacagatgaacagataaataggcaatgacaatgtagcgtgacaatactgtgacagaagtaagtgcttggctttggtgggaagtaggatcagggaaggcttcctggagtaggcaatgtctataccaagacctaaatagtgagttcagaaattttggcaaaggtgtggggagagattgccaacagaggaaagcatgaacagaggccagaggtaagagagaacatggggttttgggtggtgggagctgagagaagaggctgggaagagtgctggtagcatgttgggcatctcgtcgccattcaggaaggtggcatccatcagcggtgggctgtgcttggcactgtgctattgatatgaatgtgttctcaattccttctaggactggattttaatatttctactttacagatgtgaaatgaacatggcaataaaggagctggaatttctggaggcagggattttctggatggacgattcacgtgtgtttgccacatcctatgagtgctgggatgggttgtggttagaatggtgggggtgtagcctggccttgcctcattaacttgtggtccctgtgctatgcatttcaagacttgttccagtcccagagtgtcctgtgcccacactcagcctcctactggggcccccacctaagacagggctccttgagttgtgggttgagctccatgtctggttcttcctccttttcccatcaaacctgtgccttttgctctcaggctccaacaggacctgcaaatccacacttggggcaaagctccatgactcagggcagctaccctttaatgcttagtgtgaggcgcaagcatcatcctgccccttcttgtgctcagagcagacttgctaagggatcaccaaaccttcccattgaatccagacacagcctcagaatcctgctcaacacagccctccactgatcacccagcatacttgccatcctttccttaacccagagggaaagcttgagctcacgcagtactttctgcacaaacctagtcactgctcgcaggtagccagcctttttgtcaactctgattttgacccgggactcaacacaattcaacaaatgttcaccgagaatccactaagtgtcaaggagcagagatgaataaacatggtctcaatgccctaaggagctcacattctgatgagagacgttattgacttgagcaaccactgaagtggcagcctttctctgctttttctcagggttgtgctgaccgcacgccctgcagaactggactcaggcttccccatctgagatgtggctatgcctgggtggggctgcgtggctaggacttctgcatctcagaccagagggcagaagatgcagatgaggagggggagaggaccccactggaatggcagcagctcaaagtaaaggatgaggtcaggtttgcaccaggttaggatcaatgaacagtgagcctggcctgagcagtgggtacagcactagggtttctggaatcttcagataagctggtacactttgggactctggccacccattctctccaggcccagtgggggaaagagctgacaagcacaaagctacagtatcaggacctcagcctccaaagcagaaacagagcaagaaggaaactgaggcaggggagtagccagcccgactccacagcaggattgggcacacatgcatcaggagtcgtgcagatcaccaggcttaggaagacagcagctctaggaggcttgagggctgatttttctgatctactgcaccctgaccagcactggtttagggacgctggagagtgggttctccccatgttaggactcagtgtgagagctgcttatgactttgccaggttttttctttagccgctgagacatctctccaccccaggatctggcaatcacatcaatcccaaaaggggcacctaaagccttcaactatttgcctttctatggagatttccagaatctactcagttgatgccataaataggtagagaagggagtgtgtgtgtgtctgtctcagtctatgaacacacacacacacacacacacacacacacacacacacggagtcagacctccttcatcagaatcagtttgcaaacttcatttccttaggatgaagagaaaagaaaattattattaacatatcaatggcacctccatgctgagaacaagattaccctcagtacacacaagcgcccagggaagctcagacactgtattttaaatgtgctctgtttctgcatctccgtctcccccaccccacccccattcccttcctattttttttttttgttcctctaagcttgtttctcttgaaatttccaccttgtggttgtgtactgctgacttcacatttgctgtggtgtgaactccacatctgtgaatggatgacaggaaagattaatagccctgctctcttctccttgactgtgggcccagctaatgaataaataaataaataaataagcagagctccaatcccctaaatagagacccagagccagggagaaaacagcatttcgctgaatccattctttaaggaaaaacccaacctctaatgatctctgatttacatagtcggcagtttttcactaaacattttacaaagacacaaaagtgtggggtggagggatcgctccatgttctttccagatggaggcaggggtccccctgagaagcccacaggccaaacagggctggtgcagagtgtgggctagctatggaggtgagccggtttcccactcaggccgccttaggcctgggatcattgagtcgagcgatgatgaagagggaggcaaagggacccctcaggggtcccggtagttggtccccacacttaccaggtgggaggaaggtgtgggctcaccaggcagctcagaaagcctacgagtgtaaggggagggaggcagggagataattcatttcctcctgcttccttcatgcctccagttctggtgaaagagaagctcagatatgcgcagacagagcttctcaaacttgaatgtgccctaatgacctggagatctggttggaatgcagattctgatcagtgggtatagggtggggctgagactggccaattccattaagcctgcaggcgctgctgctgctgctccaggggtcacacttagagtagcaagatgttgcagaggcagcagaaagtcaggttctgccccctcctctgtggcccttgtctgaggcttcacaacagtcatccctttcctgccagccccagaacttggctgttacctggttttccaacctcagctgactccatgggtctaatatcccaaggtacctcagccaaatgcagcatacacatcctctctggaccaggcttggagaatttggctttcccttggctgtgtttgtaaagtatggttgttcctacctggtctctgcatctttaataaagtccatcattggatatgaagatgctgtgcctgggtgacctggttgaggggcaggtgggctcagtggcagcaaagacatctgtaggctctgattgggctgagcaagagctaggggtcaaaggcagtggatgctggaggggcagcgaggggcttccctgcacagccaggagtttgaggggcctgaaggcacacacaccagccatcgatcttaacctgctcacttctagtacccatcagctcacttcactccttttgatgatgaagcagagatgagactagtccagcagaaaccaggacaggaagccccacaatgccagccatgcccctccattatgatccccctggctcagcgttcaggtggacagtctcaggtgtggtcacatggggatgaagggagcagacaagttagggagccaagctgacccaagccctgacattctgttcttcctcatgattagcccggttgtcaaactcatcctggccctcaaattccagccgtgagtcagcctatgaaagccccaaggcaagtttatgattcacctgagtgtagctcatcttctctctggataatcctcagatgacccccacccagccagggggagctgcctttatcatcccatgggcaggattagccctgcacatccaaccaccatttatttgtcgaacctgtatttgttcacctgtgaaacgggtgaaacggggaccccaataccttcttcacggagtggggaaggtagaggagccaaccctcaaaagcacccaggtcagggtctcagtccactgtaaacatcccccaaccctggtagcaatcatgcctttgcattgccttctctttccggctgtcttctagctcatcacttccaggtgtgcttcatgaaacaaatctcatgagatattcacacagaaaaatctgtaacaaaaaattgggaaaattgcataatattcctttcttgaagagttagtctaactttacttgattctgcttgactcaaacttgtttggccatagaacctttttcttgggcataacatttattaataactggggtgtcaggagatgggagccagctgacatgcttcttctccaaagccttaacccagaaggtatgcctagtggcatctgggtagatctggccagctggggaggctgggttttgtggatgcaggttttccccactctagtcctaagctgtaggcatctttctcccatgcctatctcttgagtattctgacacgctaactccctggggctttagctcccagcacctgggcagattaggctgttcccttgcggagaaaggtgagaatttaaacttggagccacccagacaagcttaaccagagccccttgctttgtacaactcaggggttaatgcagtgtcacagcccaacccaggtcatgcctactgagactgatgtttgtggcctgcccatagccccttagcatttattgttgcaggaggtgcacactggcattccattgtaagcatttgtgactctgcaagagatatttttctctgtttctggggaatgctggacgtgcagacaattaatgcccctgggaggagccctcacccactacctgatggggtgtattagtttcctgtggctgctataacaaaatatcacagacatgatggcttaaaacaacaaaaatttattctctctaagtctggaggacagaaatccaaaatcaatattactgggcagaaagcaagatattagaaggaccatgctccacctggaggctctaggggaaagtctgatccttgcctcttctagcttctggtggctgctggcattccttgactcatggccacatcactccaatctctgcctccgtggtcatgttgccttctcccttctgtttgtgtcaaattttgctccgcttccctcttataaggatacttgtgattgcatttagggtccacctggataattcaggaaaattttcacatctcaaagtccttaattacatctgtaaaatcctttttttttttttttttttttttgccatataaggtcacattcgctggttctagggatcagaatatgatatcattggaggccattgtccagcctgatatgtaaaaggttggagggtaaatactccaatttccttgcctcttgggtaaggtaacaccgagagctgttctacactctcctctctcctaaaattcctcagagagattgagcctcagttgtccatggcaacaaactactcagcaacacactctgttgcttttctttccttcctgtctcacttctccactcttctaactgttgattcctgggattgcctctaaataaactacttggccttgaatcctcctctcagggtctgcttctggggaacccagcctaagaaacccatctatcaccaaccatgcacagcaaaggcaatcactttaatcgattaccctttggattcacaaagtctgggtggatgtgccctgtagacacaatgtttgcagttgtgagtgaggtagctgggccagcaaccccccagactacagtgttgtaaccacctcctctcaaagaagatttaatccagcagagggatgtcttcccatctgtgtctatcttgacatccacagtgaagcagaaatcttgatgggacgtgaagaacaccatggtcaccacagtcttttttgattcagagatttgaccttctccagactttggagaaagagaagccctggttaagccaaacagcttacaggggctgctaaatctgatgactgcttagcagaaaaaaatatcacacggtggaaggacatagaaccgaatgaatgtccagaggtgctgtccaggagccagggactagagtcaaaaaccttagaagtctacctcatgttctgttgtactgcagctgagctggcactcaaaccataagatgctatccttcccactcttccctcccctttccaaaggcagaagagcctcaccctggggtcacaggcaccacaggcccatggaaagtactgccagactactggaatattcccttaaggcccaagggctcttcagtcagcttgtgatgaatgctgcctggcctaggacttgaccttcagggcagtggactcctctctggtccagggcaggtccagaaatgccatccaagagccaagtcttggaatcggggaccccaacagcctgcttggtgctctacccaccctgtggctgagctggttcctgaagtgcaagacaaagtcccctccctttacttttccctctgcttttctcaagcaggagttaaggacgctcgatagccaccacagctggcaatgtgctgagtctcatctgaagccagcaagtcttggattcccacccaaggccctcagtgtagtacctgggtattgctgctggctattcagggccaaagggctcttcagctggtagttattgaatcctcccaggactgggttcttcccttcaaggcagtgggttcccatatggccctgggtatgtctagacatattgtctgggagctagggcctggaaagggggcctcattgactctgataggtgtcctgtcctgctgtggctgagctggtatccaacatgcaaaacgaagtcctccccacttttccctctcctctcctcaagtggaaggaagggtgtcttttggatccacaagctctgtagcctggggttaggggaggagtgatgccagtactccctcaaccaccctggctagtgtctcagtaggtcatatactcacccagtccactggctctgggcccagttcagcactaggactcacctaagagttgtagtccttgtggcctagactgcccttccaatttagggccccagagcactttagcctgcagtggcgaggcttgtggaaactcaagttgggatcactgggattggcaatacatttctggctagggctggtttagatgctccctctgtgggtggggtcagctaagtttggatccatttttctttctgctataatagggcagcactgaattcaatgtctcacaattgctgtgatctccctctccccagtgcacagtgagattctccataccacactgtcactgctggcggttgggaaaggggtggcatcaatgatttaaaactgtttttcttacctctttagggccttcatcagcgatgtgaaattcaaaccaggtactgtgagtgctcacttagtgtttggttcgtatgaaggtgcttttttttttttttttttttgtatatagttgttaaattggtgtccttttggggtgggaggagacaatcggtggagtcttctattccactatcttgctcttgtctatttttgtttttgttattattgtttgtctgtttatttgttaggctgtcacaatcttgggtcaagcctcatttcttttccctgggcctgttgtctttgtgactctaggctctcctctcttctgaacttctatcatagatctggccatgacaggacactcacgaaagtcctttaagtgatcctcactcttcaggacaaagttctgattcgccgtgagacttatgttgatctgtccgggcctacccctctgcctctccatgctcaactttccacctgcttgtgtgttcccctaaccttcgaagttctctgcaccagctgccatgctcaaacacaatacctgtttataactatgtgtttttgaacatgtcatttccttttcttggaataaatggccttacggactgagaaactttcatttgcttgccaaggcccacattggcagttatctacccttccctgttgctctcattgcagtttgtatatatcctaggaatacactttggacagaaattatccatggattccagatgtctggcacctcctggtcctttgagttctggataagctcggttggtgctcccattttatatctaaaatttaccccaaaccctcccaaattctctgcctcttcttccaagtgttatattttcagtgactcctccaccttgggcctactgccatcagaatttaagtcttgattaagactggaaaactcagtcttttctttgaggtccatgaacaacaccacatcttccaagcatttatgagtgcaccgagtgtagtagaactcaagtgaagatgtattttggggatgagaggttagcaccacagggaaatagtctcttccctaatagcctccaatccactctaccatcagggcttcagtcagtatcactgggcaccattttttctagctttttgtcttcttccatctcaccattttccctctttaaacctccctgccccctcttctcagtaacaaatattcccctccttgttatatgcagagaagtttgcttgttttcctttgttgactccttgcctcagtggcttattgaggcatttctatcaagacagtctgcccctactcccaggggtattctggtactagctattaagagatactcacctctgttactcttgggtgcttgtctatcatcaccaagggcctaggaagccctggaggatagagaagatgaagagaactagcttcattcttgtgggaatagttgtaaggatgaaatgcaatcttttcctcctccttcttcttattagatattgttattgttacttttcactcatcttcatattgactgggttgatcacacttgccactgtgtagaaccagctgttactgaggctggatgttcctctggcttttgtggccttgctcactgacaacttaccctcaagaaggggatcagagagccaagatgacatgtgtttgggagcagaaagctggacatgacatctctggctgtgcaggatttggaaagaccctgtcaacataggcactgccaggagctattttgtcttgtcctgactcagcccatacatgacaatctcccttgctcccttcgtttgcctgacacttctgagctccatctcagtgccacacttttcttgtgatcttcctctccagcacctctgccctgagtcaggcattaatagctcttggaagtgggtaacatttttattcccattttagagatagagaaactgaggcctagagatgttagtgaagagctgagacaaacccaggcagtttagctctgcattctcttcataaaaggtaagacaggctgtaataaaatggactgggcctttggccccgaggaaggaagagttgttcacatttgaccactggggccaaatgtgtctgagtagaggaaaaccccaggtgttgtggtggtcactgccacaggtgagtcagttggcagagctgtatttggacccaattctctccactccttgtcctatactctttctaatacaccaacctgttttactttttattaggccatccctggataaagtggagggacttgcctggggtcccaagattttgctgtgagaggtgagattagagtagagatctcctgcatcctggtctaaaactctttccaccacattgagctgcctctgcccaaggctgcgcccatctctttgcctgattttcattctctgcttctgcctcccctataagggcgctgcaaagactcaccaagacctttccaatccagttgccatgactgttagtgttatgcacctacagactttgtaattcaggttgcagagaagtcagtgtttgtctaacttttggggctgaagaggacactgagggcttgtctggggcatggggctgattggtcctatccaatcattgcctacttgtcctttgccccatctcacaaatatgtaatcaagtgataggtcaggctgttatctgattatgtttgttaagacccagataatgatttctgtttctttctctaccttcacacacacacacacacacacacaaacacactctctctctctctctctctctcactcactcacttctaggcaccaaagggctgtaggctttgggggaagacccatgctttagttctgggccttccaatatgatctgggattttggagggtgggcgacagggaggctgagctgtcactttgaattgcaaagcgtctattcataatgcataaagaggcccccgcaagtggccatagcctcctgtcgtcctgcagctcagggaaattagacagcttcagagccccttatgaaaatgcaatgtattaccgctgctttttcactagtaaattatgcattcgagagtgacaaattccaagatgccgcctttattaggaactcagtgcggggtgggtggacagtgctggctgccaagcttgcgacagaatgtttaataactttttctgactgtgcttcccggaggtggtgtttataatacgtatttccctcctctctcattttatcaaaacaccgatgctgagcttattgctctatttatgcatttggaacctcttcctgggtcaaagagcatttgaatgacaaaagcaacgacagagaccgtttttttaaccaatctgtctcacatgcctgtgaccttggtgttcttggttttttaaagatccatccatttggaggagtcagctgcttcctgaacttcaggccttgaggcaggagacagcgtgtaccatctcctgccattctgttggtaagtagagacctgtgatggtacccaggattcaaaagtcatcttccccggcgggaggcaagggaggcttatggagaacctcttaaagatattgtgagcattctactcattacttagggaaagacagcgggtgttggtccaactctggcttttgtgccaggtaggagttggtcctgaggccgcccatctgaccatactggacctgttttaaggtttttctctaaaaaaattttagatttgtcaatctgtgctcctgcaggggatgctatgtccaaatgtcccaggatttgtttttttctgtctttcctgagacattccctgcccagctacccaaggaatccttcaaacgagcaaatctgaccatatcttctatggtcagattaaaatcttccatggctccctattgcttatgggacaaaatcaaaattcctgagtctggtctaaaaggtgtttgatgatcttgacctgctgactttgccagccttcttgtcagactctcgtgtcatgctccgcctagactatgagcctgctatttcatactatgtagctttgtaagtcccagaaaatgctgggctctgactcttttataactttacatatactgttccatctgcctggaatgccttctacttgtctgtccagcaaattctcactcatctcttaaggcccagcttcagtgccgcctcctatcataagtcttccttgatttcccaggcagaattaagtccctcttaccccatctacccattgtgtttgtacatacattcattatagcaataatcatattagatttcaatgattggcttgtctttctccacactttatttttaatagaacacctaggttttagttaatgctaaacaaacatttgttggttgtctgtgtggcatcttgggttgcctgacagactcttggccaaatctgttcatgcatccaacacatacatactgaacaacttttgcagaccaggcactgctgggcctgaccttctggttccattactaacatgttagcagtgtcactttgagcaagttacttaacctctctgtgcctcagttttctcatctgtaaaatgggaataatgcttagcacttaatttttggcaagctagtgagaattaaatgggatgatgcctgtccagtgtatgagggatagcctctattagcccaggactggcacactggaagcacataataaatgctagctgcaataataataataataataataataataataatagtgctattattatattatatgcttatataggatctatttacaataatataaatataattattattcatgttacttgctctccttgaattgactgggcctccaactttccctggctgccttgccctacacttcgcagatgggacatggatcattttaattagattttattgggctgttatatgggtcataattgaggccattattcattttcatggggctgctgacacagcctcagtttagacatgatgctatcttgacgagacaagtccccatctcaaaggatccctatttgaggggctggagctgccacaggaaaagagtccttccgaggccccaaacacagattctgaagagattaatgccaggagtgttcgtcagagaagaggagatttgtgggcgacagtggcacccttctgtgtggttgttggggccacccctggggagtggggcattcatccacttggctgtgtgttccactctcaccccaggatctccagtgctctggacagtgtctggcactgagcagacactgggaaaatgtttgctgagtgaaagccacacttgcaggtgctcaggaaggtgaaagcagtgagtgtggcccagcacacaggcctggggcagcctcacaggttccagctcctgattgtgtgctgtggactgtcccttggttcagagccatgggacgcgctcgtgtagccccagtcaggggctcgtcgagggattggtattggggaaaagtcagtgtaggactatagctgggcctttcccatgagcctcaactgtctggatcagtgtgttcttaggcttggcctagatgggttattgttcaggaaagcttcactcacctccctgtgcagagtggtggagtcatatttccctgccccattgatgttggtcttgcctatgtgtttgctcatgtgacagtgaaacattagtagacttcaaacaagaagaagctgtgaacacacttgtgctatctggctcatgccctcctgcatgcacactggcgaactgctgtcatgataagcatatccgaattagtcccagcatgaccatgcatggaacagacctgaaccttgtttgtggtctgaagccaattccagccaactttcagtgggaggcaaagccaatcccttgaccccagcctagatgagctgagcccagtccgcctacagacccaggagcatgagaaccagtacttgtggtgggaagtcattgagttttggcatgcctgttgtgcagcattagcgtagcagtagctgaccaatacagagccccagagcagctccagtggaatgtgtttcatatattgagtttctatataagcatgtttgaaataagaatttgattgttgaaaacagattgaaagcctctacaacagtggttttcaactggaggcaattttgttctccagcgtacatttggcaatgtctggagacacttttggttgtcacaactgggtgggggtcggtgggagggatggtaggatagtggcatctaatggtagaggccagggatgtgctaaacatcagaatgtaccagacaatcccccggagtaaagaattatctggcttaaaatgtcagcagtgctgaggttgagaaaccctgatctaaaatctaagatcatttgaatctttaccaccaaacatctaccctccctccttccctctctgtctccctttcttctttcattcttccctcctctcctcttttcttttttttcccctccctccttctctttctttcctacctcctcccttctaaacaagatagatatatgcccaggccctcagggaatttatcttgagaggaacatctcagacaatataggcataaaccagtgaagtaatgatgacaaatgctatgcaggatgcggtaaggaagaattacaggggggaccacccttggatggggtgatcagggaaggcctctctgagcagctgacagatgtgagggtcagaaggagaaggaggaatcagccttggaagaactaacagaaaaatgttcctggctttgggaacagcaaatgcagagacattgagatgagtgtgaacttggtgtgttcaggaagcagagggagcccctgtctggtgcaagaaaagtgagggccaaccctgccctgcctggcatggggctggagtttgctgagcaattgatacaatccatgtcagctctttggaattcccagaaattcctgtagactccagagtcttgggggctcaagagggttcaaacttaaagctaagaaatcacctcaatgccatgttcaatctattacttacaggcacagggctggaaatggattggcattcaaagtaatggaatggaatgtatttatttgaacatcaaaatccttggtggattaaaatgtgctgggaatgtggagcatgacctcaccgtgacacgtgcacctgctcagctgcattgagatacagggccctgcaaaatggcttgttttctcctaacttccaccctggtcccttccaatacaggctccacaggaaagtcaggacacaaaggaatcattgcactccactctgctctcaggataaaatccatactacttcttcttttttttttttctgagacggagtcttgctctgtcgcccaggctggagtgcactggcacgatctcagctcactgcaacctccgcctcccgggttcaagcaattctcctgcctcagcttcctgagtagctgggattacaggcgcccgccaccacgcccagataatttttgtatttttagtagagttggggtttcaccatgttggtcaggctggtctcaaacccctgacctcgtgttccacctgcctcggcctcccaaagtgttgtgattacaggcatgagccaaaaatccacacttcttgataaggcctacgaagccccccatggtttgatctttgcccagccctcccacctgtctcatcctatcccacttgctctggggacctcagggatgtgcccatacctttcctgcatcacaaggatcttcttatggaacagacttctcatagccctcaacaggaaccagcttggactctgggcttcaggactgtgagaatacaaatttccattgttgaagccacccagtctgtagaattttgctagggcagccctagggcattaatacacacaggatggaagggatgaatttgtcttgaggggttgtggaaggaggtatatgggtgggaagtgggctggggctgtaggtgactgagggtgaggcacttacactaactcctattttggccctgggtgaggctgtgatggaagctgtggttggtgctggcctgggcctttctatgtgtgtgtgtgtgtgtgtgtgtgtgtgtgtgtgcgcgcgcgtgtgtgtgtgtgttttggggatgcagggtgtggcaggcaggaaggagagcttgagccagaggcataatgaggacatggagaagctgagctgtggagccagcaggaccttttctcctggaagagaaaaatgaaacggctggttggctgcgagttgttcagctgagtccttgtccctaattaccacccagaccaagcctctgggcagcatcatcctggcccatctgcagcttctaagatggtcaggatccaagccaggtgccggtgtgtgtgctggtcctcatggccagtgagcagcgaggggactttaattaaagaactaattactctgactctctacgggaacatctgcagccccccagccagtctggagcaggactccctctaatctgggctttcagagcaatgcctgagtgtgtatgtgtgtgtgtgtgtgtgtgtgtgtgcgcgcgcgtgtgcgtgcgtgcgtgtgcatgtccaggatatgtgcgtgtctgtgcatgttggtatgtgtgcatgcacttggacatgtgctttgtgtgccctgtgcatgtatgtgcacatgtattggtgagtgaccatgtatatagcttgcatttctatttgtgcatctctgtgtgtgcaggtgggaacatgtgcacacgtgcgtcatcatggtcatgtgtatgtatgtgggcaagggggtaaatacacatatgtacccaaatggtgtgggtgtgtgcaagttcttatgatttttttcctttcctatgattgaagcttcagcgactctatgggttgcatgtgtatgtgtccctggtcattctgcaactgtgagtgtgtgcagtgtgtgtgaacatggctctataaacagggccccagccgcaggtaacatctgtgtttgcactgggcttttggaagctcttcccaaaggaggggagaattcggagattttagggagcaggtgaaggaaggctggtctgtgaggtggatggtttgcagtgaggggttcagctctgccctgatgccctgcttagtcatgttggaccaaggtgggaggttgttctagacagactgtccagggattgagtgggaggtttggctctgggcaggggtgaatagttccaggtggacagagtaagccttccaagctgaacagtatgcttcccactgtgagctccggtctccttgacaacacagagtcagggctgggccctggggaaagggatgtgcatctccgtgtgcataccacgaggggaactccgggacgctctcctggtgggaactcagattgttttacgaaggggtttggagtgtggggagaagaaaattaaaaaggtctctttcaactgcaaaacaaaattcataagttttaaacttcaggtaagttcagggtctgagcctggtttgctctcagaggtagcatgatctgtttgaatccctgaagcatgaacacaagaggtttggaggaggctcagagtggacataaagagattggaggggctggggcaggcccctgaggaccatgggaaactatgggtgaccccttcatgactaaggagaggagatgggctggtgtgcctggatctgggctggatccttatggagcatgaatgtagggacagagctctctggacagtgggcaggagtggggaagttggcacatggaaaatgctgaccagctgaatcttgtgtccttccttctctctctcccattattttgattatttcacaaggaatctgaagcttcccctccatgccccactggcaaccaagggtgcagtgccagaaaaaaacagatatttccccagaagtcctgggtcaagtatttccttgcaagctcattaaatcaccttttgctttgattgttcaactggtagtgtcgggacctgtgaatggcacacagctcatagctccaagtgctcctggagccacccgtccctgccagctcccttggggctgggaagcaggggacatgccatgggccttgctgtctagaggactgaagggtcattgaccaaaataaccccttaagttgtcctaacctgctagagaaatgcttctggttagacagagcaattgttgaaacactggcctacgttttctactctttaagagataccttccatgaattaacttattaataggagtcataataaagacaataataatattcagggccaccagtagcccaggtggcagctctgagatttagaacaaggcaccatctcaaggcaaataggtgatagcaagttgtcccctttgatggccattgagaatgaggcactccttcctctgaactgaggcagccccactgaggagcctggcgaggaaggggagctcaggctggactccagctgcacttggctcccccttggctaggtgccttggtacaagggtcaacctacacagcagtgcatgacaaccctgggtgatagctagcgttctgcaagtgcttactgtgtgcaggcactatgctaagagtggacatggattatcttattctacccccacaacagctgcacaacctgggaaacatcaaccccgtgttgcagagaagggaggcttcttctctgaggcttcgggaggttctgcatgctgttggaggccacacagtttttaagtgcagcatttgaacctaggcagtctgtctcagagtccaagctcttagccacaaagttaaaggtagggcctggggcaggtaaaaggatgggaggagataagttctcagggagctccaggttggtgggtagacagaagcatgagagcccagtggactctgccagtgccctgtccatgcatcctcccccaattctgcttcctgctgatggaatcttactctctgttcaactgaggctttcccttggattgcatgcagggcagaccataagcgctgaaggttgatgccccagccaatgaagacaggaattatcctttattgggatagctctgaggcatattctaccccgtttcctaggggtttccagtggattgaagccaagttgcctacagggttccccagctcatgaacacaccccatactggctgtcttcatttcctatatcactctcctacacctggtgccttacctggacccacctcctaaatatactgctgttctcagatcctggtctcagggtctgcttctgggggatcctggcctaagacgggggtcctatgaccacccttcctaagcccatagccagccttccctacccagaagacaggagctagaggagtctaaggaggaaaaggagtattatggaaaatctccgtgcctagagcagtgcagtccagctcagaggggttcatttcagcagaggtttccaggggcagggccaacacatctgagaggagtgtgtgcacccgtgtatgtgtgcatgcacagacactatgcatgcacactatggactcaccacacaccacacacagtttccaggcaccaagcaaggttcagccttgcttagcctcatggctctgtggactctagattctcaaacatgaagctaagaggcctccttggggacaaggctgtgcagcagggaagcaaatcaggtgagtggcaggagtgtcctggtgactgcagccacagcaagtggggtgcatgcaatgcagtgcattgggatcaagtacacctgtgttttgttttgttttgcttttttgagatggagtattgctcgtcaccaggctggagtgcagcggtgcgatcttggctcactgcaacctctgactccctggttcaagcgattctcctgcctcagtctcctgagtagctgggactacaggcatgctccatcacacccagctaatttttgtatttttagtagagacggggtttcatcgtgttggccaggatggtcttgatctcctgacctcatgatccgcctgccttgggctcccaaagtgctgggcttataggcgtgagccaatgcacctggctgctacacctgtatttgaatcccagccctgcctcgcagcactatgtgacctcaagaaagttactgctcctctctggccctcccctgcctctgagactctggcccctttggcttctgcgtctgccctgacacatgacctccttgttggcatcccccacaacacccacataccaagaataaggagatgggtccattctacccaaattttggatgctggggagaggatcacatccttcagccatggagcaaacatcagcttccctcttccccttcttcctccggtctcaattcctctcccttgaataggacaagcagttcagctcccatagactcaagtaaccaaccccatcacagagcttagctgaacaaagctgggcagggctgcctcttgagccagcctccttagaagcctgctgggcttagaaagagcaaaactgtcatcttcttattcccacagcggatactgggctttcactaacattttacataaacagggtttagtatctgcaaaagatgggaaaaccacttgagtaaagtaaactgtaaggacgttgccagttccatagagctttgcaaattgctcttcaattttaaacagctcgttaaaatgcaggctcacctggtccccacaggaatctggtaaggtgggtatgatgattatgattgtcccattagctaagtcatcattgaaaagtgagtgatgttcccattttacagctgagatatagggtcacagagatgttatgcacctgtcttattgatgagacagaatgttttttgttataagtaacaaaaacctcaatgaaaatagtgttaaataatgaggacgattcattagcttggatatagaagactctggatgtaaagtggttctagggttggtcaatacagtagctacctactcagtgacttggggtcttgtcttgtcttttctcctttccctttccctttccctttcctttctttcttgatagagtctcaccctatcacccaggctggagtgcaatggcatgatctcggctcactgaaacctcctagcttcaagcgattctcctgcctcagcctcccaagtagctgggactacaggtgcatgctgccacacccagcttttttttttttttttgtaattttttagtagagacagggtttcactgtgttgcccaggctggtcttgaactcctgagctcaggcaatccacctgccttggcttcccaaagtactaggattacagacatgagccacgatgcctggcagatctttccatctttcttcaggacattcccactctgagaagcttcccatttgcaggtaggtttgaagctgtttgtcgttcatgtgttggacattgtgccaaggtagtttcatttacctactttatggaggaggatatggaagcccgaggcactgacctgtggtatccccaggatttgtggcaggacttctcactcgaattccagggctccccttcctcctccatgccaccaggcgctacctccatggaaaaggcaatgccacagttttgagctggttaaggaagatacctcctctgctccctccttcaccatcccccagtgcagagatggagcaccttggttccagctcaagaggggagagggggtagggccacggctgggggacaatttagggctgattcacagtgactatgaactaaggcctgactgagagggtatctgtgaaggacactgatcatctctgtgcttcgctcccaatggtgtctatttataaaatgttttagggagtcattgaatcttcctaaggggcagtagataaagcataaccttggagcagggagatctgctgtgttagtttaggagacgctggctgctgtaacagggaaactctgacatcccagggactcggttcaacaaagcgtatttcttgcttacagaaagtctacttggtggcagggttgagggtgggtgggggttttctgttccacaaagccattcaggcatccaggctgacagagactctatgccttcaacatgtggcttccaaggtccctctggatttcataagctagatgcgacaggacagagcatgaagggctggtgcggggcacccttgggagtggtgcacattattcctcttgattcactggctggaactcagcctcatagctatgtaatctcaaggagagtgggaaattttgtgcctaggaagaagaggaaatggatttggagagccacatcagtctctgccacacttggttttgaatctagaccttgccacacactatttgtgggaccttagcttccttaacatgtctgagcctcagtttcctcattaaagggcaaatggtgataatctcctaggaggtatgatgttgggagggtttcttgagttttttctccaacactcccatgcagtcgtggttcttacctgcagagctccagcctctatgtacaattgtccacatacttgtcaacttccttggtaataactcctctcctggagggcaaactccaccagaataggggccacactgctctcaatcagagctgcagccctaacaactggcctggcgcccagcacttagtaggcattcaataaatacatgtcggggaaatgaatggacggataagttaatatgaacacatatgtgctaagatttactcctttaaaaattcttcctcaataaatattcgcacctctatgttccatcatggtgtggtgagggggagggaggggggaagaagacgaggaggaggaggggcacctttctcccacccctactggagctcaaactataaatagctccagttggaatctgactgcagattcctccagcaaagtcagcatccccaggacctctcatcctggatggggaccgggagtgcttcctcattaatcacagctctttaattaacagctctgagcctggaacaaaaggtgcttaccgggagaacgccagcgggccctgaactctggccgcctgtttttatttggaggacctggcgccttggggagcaggcatggcatggctcagtgctgagcctggcaggggatggggtttggagggcgagcagctggcaggccggctgcctgtctccaccttggacatctccacacagagctgactcgacttcgagcaggttgctggcagctctgtcctcctcaggctgatgctgatgtcattggtctggggtggggctggacagtgaagttgtcacgttccccaggtggctctaatgtgcacagtttgaaaaacactgctccagggatggcaggcttggcagaaggcactgagatgggtccaaaggcctaactgagtgacccagagatggacacttacccaaggcatgcctaatgcccaggcagatcaaaggcccactccctcctcttctccccgttggcggatgcagcaggaatggaacctgcctttccttctcccatcatgcctcctggagatgatcagaggagagccagaccacagaagcaggacttcagccaggggctgggtgggaggcttggaaggcaggaggaagcacacacagcttggcactggaagcagtggccctagggctcctgctgagccccaggtgtaatatcaagttgatgcaaaagtcgttgtggtttttcctattgctttcaatgataaaaaccgcaatctgacaaaaggctaatatccagaatctacaatgaactcaaacaaatttacaagaaaaaaacaaacaaccccatcaaaaagtgggcaaaggacatgaacagacacttctcaaaagaagacatttatgcagccaaaaaacacatgaaaaaatgctcaccatcactggccatcagagaaatgcaaatcaaaaccacaatgagataccatctcacaacagttagaatggcaatcattaaaaagtcaggaaacaacaggtgctggagaggatgtggagaaataggaacacttttacactgttggtgggaccgtaaactagttcaaccattgtggaagtcagtgtggcgattcctcagggatctagaactggaaataccatttgacccagccatcccattactgggtatatacccaaaggactatgaatcatgctgctataaagacacatgcacacgtatgtttattgcagcattattcacaatagcaaagacttggaaccaaccctaatgtccaacaatgatagactggattaagaaaatgtggcacatatacaccatggaatactatgcagccataaaaaatgatgagttcatgtcctttgtagggacatggatgaaattggaaatcatcattctcagtaaactatcgcaagaacaaaaaaccaaacaccacatattctcactcataggtgggaattgaataacgagatcacatggacacaggaaggggaatatcacactctggggcctgttgtgggttgtggggagggatagcattgggagatatacctaatgctagatgacgagttagtgggtgcagcgcaccagcatggcacatgtatacatatgtaactaacctgcacaatgtgcacatgtaccctaaaacttaaagtatttaaaaaaaaaaagtctaggagaaaaccaatcaaatggtcaacatggatgatggcatataagtgttttaacttttctttaactttttgcattaaaattttttctatattgaataagcaaaaaaaaaaaaaaaaaaaccgcaatgggctgggcgcagtggctcacgcctgtaatctcagcactttgggaggccgagacaggcagatcatgaggtcaggagatcaagaccatcctggctaatacggtgaaaccccatcactactaaaaatacaaaaaattagctggacatggtggcacatgcctgtagtcccagctacttgggaagctgaggcaggagaatcgcttgaatctgggaggcagaggttgcagtgagctgagattgtgccactgcactccagcctgggcgacagagaaagactccatctcaaaaaaaaaaaaaacaacaaaaaaaaacccaaacaacaacaacaacaaaaaaaaaccacataaaaaaccacaaaccacagtgacttttgcaccaaccttataattcttcctaacagatctctaatgttcttttcaaatttgtctcttcacttcttctcttgtactgtgaccactgttgaagggctccctacagcagacctggctcattacagagttctgttagcatgccctctgaaaggcagtgtcttcatctataacatggggacattatgcttgacagattcccagtgtttgcatgtggtaggtattcagaaaattcttgtgtaaactctaaagttcaaatcaaagatggcaaagagttttcattccgtatgccagccttcatgtgaatggccgcggtcacctggaaaggaatttgaggccaaactggggctcagtaaaaaggatgcgggagttgattagtgatgtctctcaggggtgcaggagcaggaagtgatggccagaattgcacgactttgccatccctggtcttggcgtaaactttatgaaggtaaggattgagtctttcaaaagttcacttttgtgtcctttgcgtttagtaaagaatctggtgtacatgaagtgctcaaatgtttgtggaaagaagaaatctgtccattgttttttctaattattattttcttgactgttcctagtccacccttcactgggtcttttttggagtttggattcctgtctcctttcctagagtgatggtgtcaaagtccctaagctgtttttggaagggggctagtgtgattgagttgttggttatgcagttaggcaggcctgtgcccacgtcctgcaggcaccactgcatcctggctgtgtggtgttgggcaaggcatttctatttgctgagcctcatttgttttttatatcatatgggaataatattggattggtgcaaaagtaattgcggtaattttgcaaatggcaaaacccacaattacttttgcaccaaccttaatacgaacttcctcacatcttatcctgatgattacatgattaaatgaatctaaaatgcccagaaaatgcaagtgctgagagttggtttgcttctgaatttcaaagtccaaagtttatttcatttttttccccctccctttccgtaggcaactgcagtggggttaaagcatgaatttttatgttccctttctctgggcctagttttgtcactctgaagtcctcatttttatattctcaaatccctaattcttcccctccctattctctgccctgccacccacctgccaattaatcaattgtttcagttttctggctacatcttagtctagccatacaagctctctccttaggcttttattttccaaaaccaaggatggcatccagtatgatggcccccgctgctgcctctgcccagggtgctgactttctccaaactctcaagcaggggttaagtattaagaggtcatccctgggagtaacctgaatatttgggacttttttttttttttccccaaaatggtattttccccagtctacttaagagcatattaagtgtacatattcccagatctcatctaagacatagggaatcggaccctgggggagtggagactgggtacctgtgagcttcaagcacccaagtgaccctgtttcactctgagttttgacagtaactagagaatgttcctaagagagaacctcatttaaacagtttcccaggatgccctggcatttctctttgcatgctccagcccatttagctctttttacagtggctttcaatatggacttcacactagatcccagatcaattatgccaggagttttgggggtggagccttctaaaagtcctccaggtgatttgaatggggatccagggctgagagccatgaaattcctgagattccagctcctgaggaggaaggcaatccttggacttcttattgcaagaggagtagaattctctttgctctctgctcttacgtcctcatgattggggcagatcctagaagcctggttgcctcgtgtatgcagtagacacagttactatgtattaaaaccacttgttactcatggacttggccctcaattcttcctctcacctctgtaaaattggtctagagcagtgataattttgcccatctttttctgtcatgcacattttagcacccttatttctctgttctcccagttgatgtggcaggcaggagtgcagtagtgcaccaagattcaggctggacaagagaggaatggagtgaccctcctaggacaggctcctagcacaccgctggtctcccccttccccaggaaattaatccttgttctggcattactaccaccagagccctctagactctatgttagtgtcttggagggggagcttactatctctttgggcagcttactccatatttgagaagttttggggaccaaattcatcactacccctcttggttctcagtaacaacagaacaattcttcacccagctaattctcagacagatctcagcttaaatgctgcattttcaggagcctccctgaccactccattttatttggtaccccccactttctgctacttactacactaagcttgttatctttattacaaataccacaatcgatgttatgtttgtttgcctgtttatcacctgtctttcccaccagactgtaagctttactaagagcagggaccaagcctgctttattcacatgattcataagggtcctagcaagaaatagatgtcacacttgaattctgtagtttgagtttaataaagggactttttataagggtataggctgggcatggtagctcacatctataatcccagcactttgggaggtcaaaggaggagtattacttgagcccaggagttcaagaccagcctgggtaacaaagcaagaccccatctctacaaaaaataaaaaaaataatcagccaggtgtggtgtcttacgcctctggtcacagctacttgggaggctaaggtgggaggatcacttaagcctgggaggtcgaggctgcagtgagccatgatggcaccactgcactccagcatgggtgacagagagaaaccctgtctcaaaacaaacaataaaactccccccaaacccacaagggtgtaggcaggcttagggtaatccacaagggacagtatattacccaggactagccacaccagaaagctgtgactaacccaataactgagggtttttgcattcccaaaggcgtggtactggagccctggctggagcctttggttgaggccaccagcagcaacttgacaaataccttgacctcgctctcctcttgccttctgatcttctattgtctgagcctggtcggaagtgagggagtaagggagtccattgatatgttttatcaggtgaacattttggggtacagagcgggatggagagggcacccatggatctgaaggggccgatgaaagatactccacatttgctgtcgtatgcacagatcctggcactgtatctggcacataataggtgcttattaaatgtttgttgaacaagtgaattcttattctatttgaagagagtagtcatgccatctggatctccaggttcagctctctgttcattctattaaccttcagataatgcatttttgtgacccctttccaccctggttgcctttttctgagtgcacttctgttagttatgtccctgtaaagtgtagtctaggtgtggtctcattggcacagagcagcaggaccctcccgctgtaatctctcttcataccgcctgagatcctgaaatcccagtatatttttgggaggacatgccatgatgtcttcttgctgtcaagtgaaacccctgcatacttgcatgagctgctgaacatgttgattgaattccaggatatagatctgctttgaacgttgtctgactagtgattataggatttgacctaaattaagattaacagtggcaaacaccacacatgcatacttccatggcagacattactaatctatcaaagccatgattttctgctacacctctgaatccttctcaacacatgctttaggcagtcagtaccaatctgttggaagtggcatatgaaataaaacctattgaccattcttgctgtaggctctctttggatttgagaaatgaaggatgggaatagaaactcaaatatcttaatgaggaaaaaactgtttctattgtctgctcagccactgagcacctaatagggtctatgtgaggcttaagcaagcatgtgagtgaagtacagagctcagcgccaggctcatggtaagtcctcacattgctgtggtttgaaaaggaaactgtatatccaacaagtagaacttctcaaactctttagcaggaaaggcaagccacactgtggggtcttgctgtacagaattgaaggagctccaggtgagagtaagcctataatttgtagggcagctggaaagtcaaggtgctggagccagaaggcaagatgaaactgagacagaatccttaggtgggacctggagtgagttgtgcagccggagacccgccatgctgatgaatgcttcaggcaccagcttactccctgagttttggcctgtcctagacatccaacatgcttacacaagctgacagagaagcttctgcctccatttctcttcctggagcccagcttatttgtcaggggtccagactttggacttttgcttggtagggtggattttattactaaaccttcagttgctggtctgtgctctatcctccctcacctggcacatttctagttatcattaggccagcactagttatcactaggctggctctcataagaaggcgtatcttgaatgacatgtacattaccaatagatatgatgtgagccacaaatgtgagtcacttaatgtacttcagaatgttctagtagtcatatttaaaaaagcaaagagaaacagttgaaattaatttagataatatattttatttaatccaaatgttcaaaatctaatcatttcaacatatgatcagtataaaatgactaatgagatattttgcattcttttttttgtagcaagacattgaaattaggagtacatttttcacctgcagctcatttcaatttgcatgaaccacacttccagtgctcaatagccacatgtggctggtggccactgtgttacacagcacaggtttatgtcctaggcaaatcctacattctcagggatgtccccaagcctgacctatttgctccttccttgggctctccttatcaaaacagttatcatactttactgttattgaaagtttactatttctcctcttctctggagaatacattttatcttattttttgaggcaggatttcactcctgtcacataggctggagtgcagtggcatgatcttggttcactgcaacctccgcctcccaagctcaagtgattctcctgcctcagcctcccaagttgctggggttacaggtgcacaccattgcacccggctaatttttgtattttttttgtaaagacaggattttgccatgttgcccaggctggtcttgaactcctgggctcaagcaatctgcctgcctttgcctcccaaagttctgagattataggcgtgaaccattgtgcccagccaataatacattttataagggtagtgagcaaatgtgcttgtttatgcatctctctacctggcttgcctggcatatacaggagttctataaatccatgttgaataagtaaattaacagggccctctattctccagggaccccaccaccttttcttccttgcttccacccctgtccctgactcagtttctcagatcctggcacaccttacggcctccccatcccctctgcttgtctcatcctgaggcacctgacagccgggattattagtgggcagatcaggcaggggcctaatggacttgggcagcgctagtggggagccagcacagtacagggggcaggcagaggggcctggaatgacgaatggccctgcctgctggcccggggaggcgccacgcacatacttcccaccgatcggtgccagcaagtgatccagggacactgctaaatgccggctttaaatctcgcttaaagggccatcaagagcagcttttggccgtgagcatctttgccattattctttactaggcccttttaacgtaactgggaacagggcaatattttgttcatctgtagctattggaaagaggctcagcggagtttaatggctgagagctgggcagcaggcttatcctgggagggatctggggccagctgcggccagctctggggccttttggggtagggtgggatctggggtggttctttggtggctctgaggggctgggccctgtagcctgtgaggatgaaggctgacttcacctcctccccagagctggcctccatgctccttaggtggggtgcctggctggatacttccaggggcccctgctgcctcttggattcctgagcaaccaggagctgagagcaacagactcagcagtggcatgttgggggcaggcagctttgcattcccaaatcacatgctctttaagtctcaacagaaacagctttaaaaaaattccgacaactccttatagtccctggtccactccttccaggcacccttcagccctggcctctcagcctcaaattatctatgcaatgtgaaagcccccattacactgcttccaaagaagcagaggctcacagtcctttcttgggggagacacccttgtccatcaggtgtttgaactagtggactagcagccaaaggtctacatgatcacccaccagccagtgactcttacaaatatgaggcttcttggcaacccttaggcagggctgacatgttgtccaactcacgggagggcaccattcatatcaaggtctatgtgaatggcatcgcctgaatttgtgcagtgcacagcttgggcaaccacacgcagtagctctgtcttcagcctctagtgcgtctctactttggcatggtgttgatgtgggggtgaggggcctggctgtgtggttctcagaaagggtgatgatgggttagcctcccttgacagaggccactgctgtccttggtgtaggtctgagcctcttcctccacttcagaattctagaccagggattggcagactgtgcagttctattggtctgcagccatgccatacatatgtagttcatgtattgtctgtgactgctctcaaacagtagacaagtgaaagctacagtcgatcatagagccctcaaagcccagattatttactctctggccttttaagaaaaagtttgtcaacccatgttctagacagtggtgagaggaaaggagaaggcttctaaatgcttccttactggacatctttggagggcctgggggggggggggcttttattgattgctttaattaagcaggcctggatatatatacctcttttcttgctgtcactgacttagtggaagtaggagtgtcccaatatctttgttgtgtactatagctgacatccaatccaaggctgtgtgacctcagggccaacagagccgtgtgtgtgtgtgtgtgtgtgaccaagagagccgtcattcaagaactcattctgcaaatgtttattctacctgccgaatgccgggaaaccagatgctgtgtgtacagagacaagtaagacataggtccacaggtcctgacctggaggaggttatgggctagttaggaggaatgtgtgtacacagataactggaatatggtgtgaagagtattataaaacagaggtcctaagatgaactcttccatgaggctggttggggggatggggacaaatgagtcgggtcttgaagtagaagtagaagttttccaagtatatgaaagaggatgagggtatttcaaacacatggtcttagttctgatgtagtttcagcacctctgggactgagtgtgtaaatctggaaaacatttagaaaagttactgcgttgagtctaatgtctcttgtcctttatagtctcacagatattgcaaccctgtccttgtatacaaagacatttatcttcatttctctgtccaggcacagtctctaagtagataattacactggcaggcttgtacaaagatggacttggacacactcatgtcagccttgttcagttcattcccacccatgcctgccacacagctttgtacacacacctgagcctgcatgtgaatacacctgtggacactgagcagctggaatgtaaacatgcacacatatccctgtacacttgggtgttgtccttgatcttctgcctccagcgtatgtgatcacctgaacttcatcctctaccaccagtgataacctggctatggaactcaggcatgaagaatgttttgactaactcaaatgtgcctctccctagtttcttctttactcttatgccattccctctttctaacccacactccacttttggtgaggatatatggtttatatcctcaacaaaatatacatggtgctgtgacctggggacaaataactgggtgctctatttaggctgaagccaggtaactgaagtctcagagagctcactgttgtcaaggtgagaatctcgaaggctgggctactgacttgtcacatagccttgcttggttctaacagctccttcctggaattcaggtcatcaggaaactcgcaatccatcgagggaaggagtagatgaatatgaggaagctgagagattttagggctgtctcactcatccaggaatctgcatataatattcttctctgttttggcacatggaagccttagtgttttgctggtggtcccacactgaatagagtggatatgtccatagagtctacttatctcatgtacttccctactgtagattttattatacgcaaatgttcttggtattttccactatcatataataaacactatatagaaaattgaagtaataaactgggcatggtaggaagaatggatgaaaaacttgtacatggtgaaggaacagtatccctaatatataaaaagtgcctataaattaataagaaaaatgcaaatagaaaaatttgcaaagggtaaggacaggtaatttacaaaataaatttgagtgtcctgcaaacataaaaacagttgaacttcacaacaaataaaaatgcaaataaaaatataatttgttaccgagaggactggcaatgattaaaaatgaaaaataactgactaatttgaggttgtacagtagtaaaatctcatgcaccatgatggtgggggcaatataagtttgttcatcttttctgcagggacaatgtgagaaagtttatctaaattttaaatgtacacaccatttaaactggtgcttctacctctaaccatctatcctaggataataattggacaaatgaacaaaggtgtacaaatgaacaaaggtgtaggtatagtagccccttatttgtgggggatacattccaaatcccccactaggtgcctctcactgtgcatactactgaaccctatacaaatgtaccgtgttttttcctataccatatatacacacctatgataaagtttaatttacaaattaagcagagtaagagattaacaacaacagtaataaaatagaaccattataacaatatacagtaataaaagttatttaaatgtagtctctctgtctctcaaaatatcttattatactgtactcacccttcttgtgaagatctgagatggtaaaatgcctacataatgagacaaagtgagttttcgaatgacataggtattgtgatgtggcattaagctactatcaaccttgatattttccactatgacaatacatcagaaggaggataacttgcttttgagtggtcctggatcattgagccatgatgatttttcaaactgaccgtgggtaactgagacgatgaaaagcaaaactgtggataagaaggggactactgtgcaaggctattcatcacagcattgtggataggaaaaaagacggaacaacttaaatatccattttagctgtccgtatatgactagtaaataaattctggtaaaatggttaaaaagaatgatggagatatatgcttaatggcacagaagagcatcttgatatgtgagtgaaaaaacgagacaggtggtataatagcatgatctatatgcaaagtaatatatactcctatggctgttgtcctggagtgatgggacattgaagaatctttgcgtctttctggaggtgtacatttttctacaacaagcatataccatcttagtcaactttaaaaaaaattgcagtgccacaaccctgtcttgtttgatgttgctgatttgcctataatgaaatctataatgaggaagtacatgaattaaatagaatctatggatatatccagtctgtccagtgtgggaccaccagatcaatgcccaaggtttccatgtacccagatggaggaggagatcattttcagatccttgggtgggtgagacagccatcctcgtttttaagatagaaactttcattcatctcagtgaagagagtgtattcaggtctttgaacccaccgggctcaaaggtaatgatctataaccagataatccacagtaaggcctcttcaccatctgggtgagtcaatcctggctggaaggtcaatccttaggcagaccgtgatgttgtcttggacatcattgtttagagtgagaccaaaagggaggtgagacctttagagaccaaaagggagtttacctgtgatgcagggagggttggaatgaggaacctcagggcttgaaggctctgggttgcaggggtaggagatgactgatgggctggacttgttaaccccttgatgtcctacttaatctcttccctagctagtgcaatgatattgattagaatgatgacattcttttttttttttccccccttcttgtaagagacagagtctcgcttttctgcccaggctgaagtgcattgttgtgatcatagttcactgcagccttgaactcctgggctcaagcaatcctcctgccttagcctctcaaagtgctgggattacaggagtacaccatgatgcctggctgaaattctttagatatggtaaccacaggccccttatatttctacaacggccccattttcaaacattatatcctattatgaggcacatgtcctgatttttgctttggaaaatatggtacctgcacctttaaatgtttaatctcccccagccatgatgagaagaagagaggggaaggaagttggtatttaggggtgaatgcgattgagtggttatgtgaaggggcgggagggcggagtgaatgctgggggaccccgagatattttctttcttgtctgttttttccaccccatttctttttcctccatgtcaacaccaaacaagacaggactaaaattaatggggaaagcagcaattagcaaattaggttagcggcgtgttgccgagaggcccggctgccaggtgcggggtctctggcaggatatttattagggcctgtcagagaagtgacactttgataaatggagttgagtaatcagccccttacgacagcaagcattgtgaggcctcagcatgcacgactgccggagccaacctttgttatgatttttaaaaatttaacactcataaaagtaatacaacagcagcatccacggccacagagcatggcctcgaaccccaatcctgatgtgcaagggaaactgtggatcttgagttttccttttggaatgggcaactgggaaaagaaaccaatgtggaaaagtctgtctgagttttggaaatgccctagaattaaataataaaaaataaaaaacaggagtgggttttaaagaacaagaagtgggggagttctgttttcacttggctagtctgcaaaggtgaccgtttgctgaggcgccagagtggctggagttgaacagggggaacggacactgggaacccaaggagggtggctccgtacactgatggagaggcccctgggaccaatgcctgtaaggatggcttgcccaagattcttgctgcagggattcctttccttggcaaacacatgcaatttagctttcctctgcaatgaccagtttcctggagggaggattcaataaccaggcagagagcagagcacactgccctagtgacagggtttgaaggaggaggaccaggttcctggccagagatgggtcactgtgactttcagaagctctccatacctggcaaatctcactggagtataggctcaatgtgaacaggctggctggagagccactgcctctgtttcctggccttcagcctgctgcttcaatgcctggcgtcgcctcacttccaccaggtcatagtcttcctcagctccccactgagagcacagtttcccttgcctgagtggtatagcagtactagaaacttctcatttgactgatctgctagctcttatggtgtctcagttgctggaatcctgctctgatcctgttttgcttggctggaccctgactcttcgccctctcctaacactccctattgcactggactctgtcactctgtccccaggtctggtatcctgatcagggttggatgcatctggatattgatgtaggccgagtggaactgaatttgctatacctctgtggacattggcactggactgctgacttctcaccttggggccaggtccacagccaggtggccagccccagcctgctcctcttccccatctagctcctgctgaggttcaaggagctgcaggcctgacccatgccagtgatggttctgggtgagtgcctttgataacctccagcaggtgtgtccccaaaggctgactcagtctcacgttccctaacacatggccctgagtagaatgacagtatctgtggtaggagggagatgggagtttgggttgtgactggttgttccaggtatcagccactagtgtctcctgcctggccccctataggccctgagtctctgaaccttccttcgggctgggaccagaggctgataatagagtgagcctcttcccagtcttctttggggcaggctcaccgcagtccatctctgtggatggacactggggcatggtgaggggtattggactctcatgtcaaggagggtggggaaacctggggttcacatcctcacctcaggagtccgaatttgggatgaagggcaatgtgagctatgctccctagcaccttgctaatgttctgccggacatggcttttgccattggtttgagttgggtcaagccagggaagatccttgagctgggcacagagctccaggtgtgctctgtgcagcacagaggactatagaagggtcccctctcatgacccatgtgcctttttcaggaaaaacaatcctattattttacaagagggtccacaggatttcaaattcttttcccccgagcttatgcaatatatgatttgaaccgaacttcaatgtgtgatgaaagaatcacccctgttgaatttcctttgttggttttgtcccagccatccagtttgtggagatcattttgattctgccaaatcagttatttcttaggctttggaagagaagagctcattttctaagtctgtgaagttataagagaacatggcaagaaccaaacctgtggccccctgctgagatgtctgccattctttttttccttttttttttttttttccagacagggtctcactgtgttgcccaggctggagtgcagaggcatgatcatggctcactgaagcctcaacctccagggctcaaactgtcttcccacctcagcttctcaagtagcttagcccttaggtgcatgccatcacacccagctattttttttttttaaagaaataaagtcttgctatgttgcccaggttggtcttgaagtcctgacctcaagtgatccttctgcctcagcttcccaaagtgttgggattacaggtgtgagccaccatgcctagccatgtcttctcttctcttttttttgagacagggtctggctctgttgcccaggctggagtgcagtggcatgatgtgggctcatggcaacctctgcctcctgggctcaagtgatcctctcacctcagccttctgagtagctgtaactacaggttcatggcatcttgcccagctaattttttttttttttgtagagatgggcttttgctgtgttgcccaggctgatctcgaacttctgactcaagtggtctttccgtcttggtcttccaaaatgctgtgatttcaggcgaagcacctgctccttcctctacctgggaagccccagccccaagaatctgcatggtctgcttcccaaccttcttcagtctcagtcaagatgcccccttctcagctcttccctgaccatcctacttaatgctaatttccccactgctcattctgtccccttaccttgccttggtttttcttcatagcaatcattgccatggaacatactatacatgttactaagctgtgtgctgtgtctggcacctcatgcagctacctgaggacatgggttctgctgattttattcatgctatatccacagtgcaagcacagagcctgaaattggtgctatctcaataaataaatatttgttaaatgaatacttgtctaaaatacagatattatcagtcccaagcatgggcactgcatcaaaaaggaaattagagtaatttcacctgacattctctggagatggacatcagatcatggtaattgcttcattctttttaaattacttgccaactgaccagtttatgagaaggtctagagtcaaaaaagggattgaatctgactgcttcctgttttggaaaatcaatacattatttttcttctggcttctccagcattctccttggtttcctaaagattcttcatgtgactttgagatggtatcagtgagattctgctgttccctcccaccttgtctgcaatattgtttcaaagcagagtttttgcaccatcatcaacctttcctgtgtgcctgccaggtgcagagcactgtcctaggccttgaggacacaaagccacagagaacactttctttgcttcagagctttctcaggagtcatggtggggggaaagctgtatccaaagtgacagtggcccagtgaagccacatgttgagaccatgtgattaggtggacagtgaacatgatgggtcgaggctaggtcagcatgggcatggggatcttgcagaccctgctgtgaggttttctttctgtggattatgcactcaacaaatatgtattgagcttctgccatgtgtcaggcactgtgctgaacactggggacacagtaatgatttggacagatgcacatcctatcctcatggagccacatagtctagtaggggtgataaacaagtaaacaaataaaagaatattttgcttgttacaggtactgggaaggaaataaacatagtgatgagattcaaggtgaggtgaataattatttagatagggggtcagagaagtcctctccaaggacttccaaggagctagccagggagaacaaagaaaggtcattccaagtacctacagaagccccaaggtggcaagggcttgatgtgttatggaatctgagaggagaccagtgtgctggaatagactgtttgggaaagggatagaatggtgtgaggtaagctggatggggaaggcagggatcggaccatacaccgcaccttgtaggtgatgagagggcaacaggatttctgttaggagcaatggaaagtattttgggggaatagcatggtttcacttccattttacagagattgctatggctacaacatggagaatagattgaagggaagtaagaggaaaagcaggacgactgatgaggaggctgctgcagttgttctggaagagatggtggtggccagggcttggtgagggtggatgagatggagagaggtggctggatctcaggcgtgctcaggagttcaggtcgacaggagttgttaatgaattgggtgggattagggagaaagcaggaatgactcctagttttcagtttgagcatgcggatggattgtggtgccatttacaggaagaacatgcttatccagattcacctggtagtgagtgatgagttatcaaccttctaaatcaccacaggtatgaccactttccccccatcaccagagtcctaacaagaaggctgtatgccccgtgctgggtgagctcctgtcattcccaggctttgcacaggtggtgggctttcagaaagcaaacatccctgctttccagaagcttagtgtaagattttctatatataagactgtgtcatctgcaaacaggtataattttacttcttcctttcagaaaaagcttttgactaaattcaagtttggatgcctttatttttcttgcctcattgctctggctaggacttctgatgctatgttgaatagaagtggtgagagtgggtatccttgtctttttcctgatcttagaggaagagtttttagtttttcaacattgtgcaatgttagctgtgggtttgtcttatagggcctttattatgttggcgcaaattccttttatacctactttgttgaaaattttaagggtatgaattttgaatttagtcaaaagctttttctgcctttattgaggtgatcatgtcatattagttctttattaatgtggtatatcacattaattgattttcttatattgaaccatccctgggataaatcccatttggttatggtgtatgaacttaatgtattgttgcatttggtttccttgtgttttgttgagaatttttgcatctacattcatcagggatattggcctataattttctttttggtagtgttctcatctggttttggtatcagggtaatgatggccttgtaaaatgagtttggaagtgttccttcctcttcagtttttttgaagagtttgagaaggattcgtgttagttctcctttaaatatttggttgaattaaccagtgaagccatctggtcctgggttttctctattgggagattttttgattactgattcaatgtcctcatttgttattggtctcttaggttttctattttttaatgattcaggcttggtaggttatatgtttctagaaatttatgaattctaggttattccatttattagcatgtaattgttcatagtagtcttttacagtcctttttatgtctgtggcatcagttttaatggctcctcttttacttctgattttgagtcttttctcttttttcttagtgtagataaaggtttttcaatttttatcttttcaagaactgaactcttagttttgttgactttattgttttttgattctctatttaaaaaaattttgctctaacaataaaggccatatacaactgatgtggtttgtctgtgtccccacccaaatctcatcttgaattgtagttaacataattcctacatattgtgggagggacccagtgggaggtaattgaatcactggggtggttacccccatgctgctattctcatgatagtgagtgagttcttatgacatctgatgattttataaggggcttcttcctctttgctgggcacgtctctttcttgccatcatgtgaagaaggatgtgtttgtttccctttctgccatgattgtaagtttcctgaggcctccccagccatgtggagctgtgagtcagttaaatctctctcctttatgcattacccagtctcagcagttctttgtagcagcatgagaacagactaatacaacaacaaacccacagttaacatcacataatgctgaaaaactgaaagctttttctctaagattagaacaagacaaagatacccacctttactacttctgttcaagacagtgctggaaatcttagctagagcaattaggcaagaaataaaaaataaaaggcattcaaatcacaaagggagaaataaaattatctctgtttatagatgacatgatcttatatgtagaaaaccctaaaaattccacaaaaaacctgttagaagtaataaacaaattcaataaagttttagggtgaaaaatcaacataaaaaatcaattacatttctgtactctcacaaggaactatctgaaaaggaaattaagaaaataatcccatttacaatagtatcagcaagaaaaaaatactaagtaatagacttaaccaaggaggtaaaagacttgtacactgataactataaaacatcagtgaaagaaataaaacaagacacaaataaatgaaaagacatcccatattcatacattgaaagacttattaaaaatgttcatactgcccaaggtggtctgtggattcaatgctatcctcatcaaaatcccaagggcattccttttttttttttcttgtttttttgttttttttgtttttctttttaaacagcagtagaaaaaacaactctgcctctttggtgcaggtttctgcaatgtacagttgatgagtccttcctctgtagaaaggcagtgtggtgtagcaggcagaacacaatgattttggagtcagcaagatcatcacttttatgccttggccacactcaacagtagtgttgggcgaggtttatcacctctctgaccctcagtctcatttgggttaatgccaaatgagtcaataaattatataggatagtttccaacatataacaggctctcaataaatataggttgtaaattactacagaaactcggaagctacatctcaaagccatacacattagggagggctttatctttaccccagcaaatcttgggcatgcacgtcttccagaccagggatctacacatgggtgagcaaggcagctttaaccactctgcagctaaagggaccttttggagcactgttttggggttgcatgtggcagggaggacattaacattggacatggttcagtgagaacttgggctggtcaaatattatgatcattattatggtacaagggctacatggaatggccagatgattttgtccttggaaaccatgggacttgggcagagaggatgcttctttcaggctccagccatgacagttgtcccaaatcataacagaaggaaggatttaggccccatgaattggattaaacttttacaatatcctataacctttgctatcgtcgccacgactgatgtcaccataacaacaacgataaccaccccctccccaatataagtttcataatgatttgttcattgcaaaatcaccaatgcctacaggagttcctggcatagttgtaaatattactgtttataataaccattaccactgttaaagttagtagcagctaacatttaaaaaatgcatgtgttcatcatctcatttaattttcacaacaatcttatgatttaggctggggttcacaatctacaacctgtagaccaaatccagcctgtggcttattttgtaaggtctgcaagctaacaatgctttttctcattttaaaacagttgtaaacaaaatgaagaagattatgaaacagagcatctggcccacaaagcctagaatatgtattatctggctgtttgccaatccctgatatggagtatttgccagagtaggctagtgatatagtttgaatatgtgtccccaccaaatctaatgttgaatggtaatccccaacattggagatggggcctggtgagagatgtttggatcatgggtatggatccctcatgaatagtttgggtcatccctttcgtgataaatgagctcttgctctgagctcatacgagatctggtcgtttaaaagtgtgtgatacctacacccttgcacctctttctcttgctttggcttttgccatgtgatgtggctgctgctcctttgctttctgccatgattataagcttcctcatgtctccccagaagctaacaccatggttcctgtaaagcctgtagaactgtgagccaattaaacctcttttctttataaattgtccagtctcaggtatttctttatagcaatgccaaaacagccaaacacatgtagtgtatgctgccataacaaacaatgaactgaatggcttagcctaacaaaggtttatctcttgctgactcaatgtcagctgtgggtctgtgcagccctccagcgcagtcaccttccagatgatcagccatccaggctatttttattctgcagctctgatatcttagcatgagacctcttggttattgtggcaggggaagagagaggttggagagccttctgggaactttttagtgtgtcattcagatgtgacagctgttacttgcacacgtgtttcattaaccagaacttgtcacatggcccagcctaactaactatgaggggttaagaaatgtgaaggagcacctggaatgagatgaggaagctgagtttctgagaggtaaatcctttgctcaagcttacacaacaaggaaaaggcagaacaaagacacgtatcaggcaagtacaatttccaaagtccgtgatcttatctattacattctccttttcttatgagctccttgttccagcaacaaaccgcattaaacatttcgttactttggagtggctcagacagaatgttcctatggttgctgacacatctcccagagaagtcttcccagctctacacccccactcccagcctctgtcctcctggctctggccccaaaggggctggaaggtgccacagccagagtaactcatgactcctttggctcctcacagtgatgaatgacagccatccatcgtgggccttgctgatggcccagctcatccatcatggcctggtgttctcaggtgatgtatgagtgcctgaagaatggattgcttaacggccgatttgcttggaaaagaaactgagccaaagagtggattcaatctaattacctgctcactctggccaggcctgagaggcactttggcagcccctcataggtccccgcagaaatatgacttgcagttcttgagctacgaggtcattcctaactcattgctgatggacagggcattatttaaaaaaaaagaaatgtggggaggagctgttggcaggtttgctgcttgatggaaagctaggcaggccaggtgaatcttctggaggtgaatcaagggcaaaccaaacaatatttggggtgataattgagatgaatcagaggtgttgggtcaatggacaagtcagtagtcaagactgtgagctctaaagctcaaaaggctacaagactgtagccttggttttgtgtcctattcctgtcacttactctctgtataaccttgagtaagtctctgaacctcagcttcattttctataaaataaaaataattgttgtgagaatttaatggaataatagatatgaagtgctgagcatagcaagtcagggcctagtaagtgatggtgagaattattataatgaaaaataatattaaagattgttcttcttgatatctatcacttaggggttgcagtattgccagagagacagtattggacaacgataactgcaaattgttattctcccactgagagatggagtggctggcctcatgtttacttcaaccaatggaatatgttggccactggcctctgctcttctctctccctgttcttattccaagctgcccttgccatatctgcttctgatccccttggtttggtgacatgctaggattctgttttctggccttcagtatctttctattagtgtctcagctctatatcctcctttaactatggtgcccctgaagccttggtgagagtcactgtctccactagcctgagccctgcaaagcttccattggtgctgtgccagttctgcgccttgctggcctttaagagaactggattcttctacttgcttttttttttttttttttgaacttgctctggggaaagccaaataatatataagatgttcaattaccctgagactgccatgctatgaggaagaacaagctaaccacctggagagaccatgtagagagggatgcttggccagttctcatcttttctagccattgcaactgaggtgccaaacgtgagtgaagaggtcgtcttggatgtccagctgagttgacctttcagatgaccatagtcccagccaccatgtaactgcaactgcatgagaaaccccaagtgagaactgcccagctgagcccagtcaatccatagaaaaatgagagggagtgataaattgctatgctgaactactaagttttgaggtgtttggttatacagaaatgaataactggaacaggaaccaatccggataacgagtttattcaaactaataattattgaatattaaatgccaggaattatgctgggaaaataagctggtggatattggtcttgcagcctaaaagctctttcaaaccttagagttccaagatatggctgcagagaatgcctttcataaattgatgtgctttttcagcctcagggaggaatataccacttattttggattatgaaacttaaaaatgccttcttttgtaccgactttcattcccatacttaattaacccattcttattttatttttacattgaatatatcacagaacactaattttgtaaaacagtatttctcaaaccatctgtgttaagatcagtgcacatgtgtgtatgttttaaattttcaacctgttgcatgcagactgatacttttgtaaaatacaacaaaaatgagttactgaaaaaatgaaaaaaatacacaaaatacaggcctactttttattattagattcaacagacatatagttactctgtcaaattgttattatggttcctaaacagctgctctcaatttcgtttcttgttacacgtcaggagccagtttgtgaacagcaagtatctgtggatcacacaccaggaatagtgctgctgtagaacacacttcacatacctcaggaaatgctactgtagattaaagaaaatgcagaattggggaagggcttttttttttttttttttttttttttgagtatgatgggacttgagtctgttttgtattttgagaggaaggagccaatgttgtgggagaggctgaagatcctggaagatgggcggactgatggaataatgcctcggagactgcagtagataaacagagagcaaggcctctcccaggaggtcaccaaaactgcccacctacctcctccctaacccactggcttctgctttcctctctccctgttcttattccaagctgcccttaccatatctgcttctgatgcccttggtttggtgacatgctaggattctgttttctggctttcagtctctattagcttcttagctgtatatcctcctttgactatgatgcccattaagccttcgtgacagtcgctgtctccatcagcctgagatctgcaaagcttccattagctgcacaggcaccaaaggaaggaacctgtgggcacgttcagtgggtgaacctggaattagcctcatggccacataagccctgtatggacataccttttctttctgtctgtccagctttgattattttaggaactaccaagtcctttgtctataaacatcttggtcaggaaactgaactttccaaatacggcttttaggaagcttatacccctgccacccatgggtgggcatataaccccgccaggccaatcagagcctttgctgggacttttgcttgacgtattatgaaaaatgacattgactcatttggaatatagccttaaggacagacaggctggcttggtcacccctaagagggggtaacctacctaaggacacaatcaagaagagcaaagtcaagagactgagagggcttgattaagttctgacagcagcatcacttggattctgctgtatctcagacttagacttcccagttatatgagccagtatgtttcttttttaattttttgcttaagctattttgaattgggtttctgtcactcacaaccacaagagcttggatgaatacattcatagttcaggggtggtaaacccatgatacatgtcccactagttcctaccttctgtgcccaagataggcatgttaataaatcacaacactcttactaaccctagacttgacttcagaatttttctcaacatagaactacaggcagcctctcccaaccaactagagcatgcacgtgagatgaaagttacttgttatcctcaggggaatattggatgatgcaggtttctgtcatgttttcctgattctgtggctggtgacctgccatctgcttcaccttatctgttcttttcagtaattctttccccaagaatgagaacccgggactttcatttccacctgcttcttgaatcctgctccaaatatactcaagtcttgcagttatgactttgctgcctatgtgatggaccgaaagtcacctctccttatatgctcccatcctgggcttcattccccagtggttacagatgcagccttgctgtgctcctctacactgagaaagtccccctgccagtgagttaatcccatcctgggattaactcatgtcagtgaattaatcccatcctgggattaactcatgtcagtgaatttttaacaatggcccacttgcatcacacagcttggattgtcctataaggtgtcccattggtgactgatgtagtcttctttcaatctattctctgcatttcagcaggagtggtctttcaaaatgcaaatgcaaaccatattattctctgtctataactctgcaaaggcctcctattgcatttatgttctacaaatgttgacttcttgctatggctttcaatgccctgcacagtctgctgcctgtcagcccacccagtctcatgctgaatgaccacctcctcaccgtttgcactgaaaccatgtgagcatctgtcagttaatgtctcctgctacagggactttgcacatgacatgccctctcttcttcatctccttgattcctactcatcctcaggtatcagctgagctgtaactttcatggggaagcctttattaatcactctgattaacttaattccctccatatagaataatctagctataataaaagagctaacaatatatagcacttactgtgtatcaaggcccattataagaactttacacatgttatttcatttaatcctcacatcgatcctatgaggtcggtactattattatcccattgtacagatgaagaacctgaggcatatatacctctcctccataccacttcttagagttggaattttatgtttatttgtacttaaaaaaaaatttgtccctctctgcccttgaatgtgagaactgtataaacagggattctatctgcttttgttcattacaacatccttagtgcctagtacaggacctgacagaattggagctcaataaatatcttcacctttggcagccctgagccccaggggccttctctctctgtctttgatggtcatccttccaccctctagtctgcatgtttgtgtagagttttaggatagggctggagtgtctaagagagtgaggctccacaacttctaggcagcctttcagctggtaggagcctttcaggctgtgcaagagtgatggggagtgatgtgggttggctgtgtccccacctaaatctcatgttgaatggtagctcccataatctccatgtgtggtgggaggggcgtggtgggaggtaattgaatcatgggagcattttccccatgctattctcatgatagtaagttttcacaagatctgatggttctataaggggcttcccctttcatttggttctcattcttctctctcctgctgccctgtgaagaggtgccttccaccatgattgtaagttttctgagggctccccagccctgcagaactgtgagtgaattaaatctctttcctttataaattacccagtcgcgggtagtttcttacagcagcgtgagaacggactaacacagggagcaaagaaaggggtatttagggttaaagacaaggctaactggatggggcagggtagggagagacattgagcacagctgcgggttgaggccagggccacagaggccaagccccagtgactgatttcttggatggttggagctgagctttaatagcagccttgacaatgacagtgatggaactcactaccacggagcctgcgcctgggtcaggcaatagatgggggatgagaagcaagttgtacatggtgcatgcatacattctgtgtgtgtgtgtatgtgtatgtcgtgagtatgagctgtgtgtgtacgtgtggttgtatgtacattcatgaaatagctgtgattttatataattgtatgtacattagtttgagccaaatgaaattgccaataaaagagcaatttcatatggttgagcaaaatgtatacacatatggatgaccataaatcatgtgaacatgtgaagcatttatggatattgcatgagttgatgctgcctgtggcacagtctcagtatgtgtgtttatgacatcattgcaagtgggcatgagctgtctaaggtggcagctcatgtatatgcacatggtgcatgtatgtacacatggtgcatgtgtgtggtggtgaggagaggctgatgaatgtgtcaagactgtctgccatatttggatagtgacacataccctctaataacagagtgagtagacatgtgtcttccaataattgagtaaggggacacgtgctctctggtaactgagtggccttcattttagcccagggataaggtgtatctcgcagaatacaatggacacccccaatgccccatcttgtgaacataggagacaagctgctccttggcttctccaggcactgtctttgatcagaccttatacaatacacattgccccatctcacataacctttatgcctaccattgcagggagagtacatcactctgttagaaaaatccccaagcagtcaatattacttgcttctggaaaatgaggaagaaacagtgtggcagaagttaagtaaccttggaatagcataaataggcatagacatgataaatagggcataatttgcagaatcaaatcctggatctagcccttactagctgtgtgactttggtaaacaatacttaaattgatttcccactgttaagttttacctagcacaacgccttagacatcatagtgctctttgccacagaatctggggtttgaagtaagtgtttcctcttatgcaaaaaatagttataaacatctactatgggagttatttttgctattcaccaatatttctgggttttggtctcttagacacgtgataggattgaatttccctttctcttttagtccaggtgtgccacgtggcttgttttggccaatgagatgagaacacagtgacatggtggaccgtttttaggtggaagttttaagaggtagtgcattaggtgccatgttttctttcccctgctttggctaagggaaatcctgcaggtgaagtcttcctcagcctgggtctttgagggaggataagatgcagcagggccccagcagacctatgacagatgtgctgtgtagtaagacatgaagctgttgtttcaatcccgaaattttggggttgcttttgcagcatgacctgtcttattttgctggacaccagttttgccttttggtccacctgtatggtaaatactcatcctcatttcacaaatggcaaaactggcctgagacatgttaggtttatcttcagtcagtcaacaggatcaaccttttggtttgaaaaaaggtgacatttgggacctttgctccatgagtactttgagtgtgccagaatggtgacccaatctcagagacatttctttagggcattggggtgttggccaagggagggcaaatagactctcataagtggagaagaatttgtacaatattttatgacctgattctgataacaaaggaagccccaaagtaggttagggtgataatggagatttaacttgctcctgctgggaaattcacccagcaagatgcaaaacccagaatagatcacttttcatttctcagagttacacaggttatagatgatcattgtataaaatttagataattcagataaatgaaagattaaaaaattaaaatcatctaggcttggcatggtggctcacgcctgtaatcccagcactttgggagaccaaggtgagcaaattgcttgagctgaggagtttgagaccagcccgggcaacatgacaaaacccagtctctacaaaaaaaaggaaaaatcatctgggtgtggtggtgcatgcctgtagtcccagctgctcagagcctgaggcaggaggatcaccagaacctggggacgttgaggctgcagtgagccgtgatcatggggccactgcactctaacctgggtaacagagtaagacctgtctcaaaaaaaattaaaattatctgatattctgctacttagagataaccaccattcatattcaaccttctaaacattctccatgtatactttaaaattggtgattacagtaattgctttatcttttatctcatttaacacatcataaatatccttctattttaagtaaatagggggccatatcatcattttaaatagctgcatagtattccatcatatgaagcatcaatttattagtatttcttaatgagtccaatacttttggacctttaggctgtttgcaagctcttgctgttataaacaatattgtgataaaactccttggaagaaacatcttctggcacttgcctaattatttccttagaataattctttgaagtaggattgctcgtcaaaagaaatgtactttccaagggcttttgttgcatattgccaaattgctgtccagaaacactgcattaattttcagtcctagcagtaatgcataggaatgtccttttcttgatttccacatcagtccagcgtattgtcaatctcttaaacctttgctaattctaacagtgaaaaattgcacttcgttgtttcaatttacatttctttgattcctagtgagtttagactatttttttaaaggtgcattgttagaataccttcttggtgatcctattggaatcccaagaatacagaggagacaatttgttctttcattcattcattcatttaacatgtttatttgcacctactatgtgctaggcacagttttagaagctgaagttacaacagggaataaggcagacccagtccctgtttcagagcctatatatagcagtgtgtgtgtttggggggactaggatcttaaccccagggacatcaggctcctgaagtactagcggagtaattatagaaagtagctactcagttctagtcagcatgggctcagctgtactacagccttaggcaaaaagaaaaaaatccataatgtgaatcctatctttattcaaattttgatattttgttcattatggatttttgcactaattatgattttaaaatgttgccatataatatgtattctgattgctgagttttcttggtgcacttttaagttctgtacctgagaaaagtgcctcactcatcttgctctaatctcggccctcctaatctatttctgatttctaaaatttctgtgcacacacaggtgagaccctgcaacctgaactcagggctttccagactcataaataagtgctgttctgactacacatccagaaagatttcaagtcagtccaataactattactttgaggaattgctgtgttccagggcctgtgtcaggccctgggatataaagacaagcactcagtcaccattttgaaggtgagatttagaggcctaagtaaacaatataccctgtaatcgtccatcagccatctctgtccttagaagtacatgtgagtagttatgccatcttgttcccatcctggtctcaatctttggtggaatgattaccacgttctcaaaggtcttggaaaactaaatgttaataatgttaacctaaacataaaataactgaaagctatttaagtttcccctgtgtgccaagcatgacactaggcacttgtagcagttaagtaaaagggagaatttaattatggagttgattacacaggtgatggaaaagttgagaagcttagtaggagagggtgaggccatccagactttattcaaaagtgggaagccactaccatctccagggctagagaggcaaagggaaatgatgtagttatcagggctttggggcagaagttgaaatatcaagtgtcctgttccacaggagctgaaaacatcgaggaggttctgctcttgctagagatgttgcctggggagggaggaagaagatgatggaaaaatagccagaattttccttcctcttgccttccagtctcccaacaggacttcccattggccctctcctgctggaagccagctgatcttgaagccaagtcagaggttggctctctttgatagagaggagagttagggaagagggaggaacagatctgattgcaaagaagtcacagaatagcatcctcctgaacataaaccatctttaaaaattctcattaccaccctgaagttaagtactcttgattccattataaaaacatgacaccagaaaccaagaggagctaagagatagctacagggacacacagtaataggggaattggatttgaggttaggcttgcttggggccaaggtcctatttttcccacaccacaggcttcctctctaccctgaatcatcccaccatcatccagggcatctccagtgctcctgagggtcacccctcccttgcccttgctttacagttgcttggctgccccatctccaatgactggcacttactctccatcagccaccatgttgcacaactcctttgaattttatgtgaatggtattcctggagttatccaatgggatggccctgttgacaactacctaagcccatgaccatggtttggatctagtcattatatttgaacacttggcctctgaaatcttaggttctaagaggtccttccctgctgtccttcttcctcctttctttcacttttgttgacttgcctttttgacctttctctaaccccattggtatttatttccctactctgagtctaccagcccttcctggattgaatccccaatatgcccaatctaggcttcattgttgtataccactcctgtgacctttgtctgatacactcttggcagtcctacgtaacctttatcattctttgctggagaaaaccacacaactgtggagattgagctcattacacacttatgatttccacgcctgcttagtgcccttggatggtcccctttgctcagctgtagtttaagaacttattttcccctgtagtacttacttctaacctcatgatctccccgtgggccccaggttgcctttttccgataaaggtcccaatgcctacattcatctgagccagctgggctgccagtggaaatgcgggggtgagaggacagggcagagcacaaagattcagcgtgtcttcacagaggtggtaatggtggtgcaggtgtaacaccagaggtacaggcaggaagactaagaccagatgttggccattttcttctagtgcatgcaaaatgctttattttcttgaggtttccaatttcccaagattcctaggcttgatggcttcataagggttaactcactatcctatggctctgccattaattactccagtggctgcagacactgcacggagctggatcctggttgttccagcttcagagtgggtttattgccaaccatgcattatgaagaactaattgtgagccccttgcacctgctggttccccctgtggctgggactcaggaagtggggggagagttattaatgagcttgttgctcattataataaaacaatggggaagttggcaaaggagctggtggtccaggtgtggtgtcagagaaggctggttggcatttctggaaacatgactttacagtcatatcatctgcctccttccctggctcatgctgtgacaccaagtgataaaagagctgtcatcctgagggccactcagagtccttgtgaactcatgatcagcggaagccacctggatggaggaattgctgagccagcactctgtcctggctgagatgggctggggcatggggaatgctgggatttcagccccagagcagaggggacagacctggctgtgccctgggttatctaggcttaatagatacagctgagaggagtggaagccagtggaaggccaccagaatgacaacctcttgcacgttgaagagctctggataggtaatggtttggggcacagatacagggctgggactagggtaaggcaagccagggtgcagaatttaaggaggccttcactctcaggcttgtgcaaattcagaagcagcattaagagtgagtgcctccttaatgtttgtgccctgagtgcaccctagtctgggccctgcacaggtgggtggctatactagaagggccaggtggtagctcctccttgacatcctcccttggagcttgaggcagatcagtggacatctcttcctggtcgttggttctccagggactggtctggaagcccactcaggaaagtactatgatgacaactaacatcaactgggcagtgccattattaattctccttctcatttaattgtcaagacatacatggaaggggggtaagaagaatattcttccatggtggtgaatagggcaggctcttggattacagtttctgccttcaagccccaactttgccacttaccagcccagtgatcttaggcaagatgctaataccctgacatcttggtttcttggagtgcaagtggcttcttctgttccttgaatatatcaatttgttttcacctggaaagttcttctcctagatatttgcatgatacttttttcatactattcaagtctcaggtcaaatgccacttccttggagaggccttcccaggcaacctcatctaaaggagttccttaccaccatgtctaaatattgttacattaaattattgacttcatagccattatcactctctgcggttatctttatttccctgatatctgtcttcaccatttgaaagtaatttccatgagggcggagattttcctatttattgctgtatctatagtgctggaactgtacccagaataggtagttgctgatataaaatgtaaataaatgaattatttagaaatggcacttaactcactgtgttcttgggaggactaaggaggcaatccatgaagagtttggcacatactaagtcctcgcctctgagattcaaggagtgtaagtgacttgtctacattcaccagccagcaagtggcagccctatgacccaagacccaaaatttgtgctgtaaccttctatccatcacaggttcccaggtgctttctgatgagtcagaaaaagaagctgggctgaaaactacagcttctctggaaaagagggaatcctggggagaggagagaagaaatctgtgtgggtagaactatcctacagctctatcgtgagaatgatcaggttgtcataaacaggaaagatattaaacacattttacagctggactgtgacaggctaataatggcttcaggagatagtctatgtcctaatccctagaacctgtgagtgttacctttttagataaagggtctttgcagttttgattaagttaaggatgttgagatgaggaggtaatcctggattatctgggtgggacctaagtccaaacccaaatgtccttttaagagagaggcagagggagatttgatataggcagaagagaaggggtcacataaaaatggagacagagattagagtgatgtggccacaaagtcaggtggtgatatgtgctattttgttagcatgatcaggcaaggattccccaaggaggcaacacttgatcatacacttgaggaagcgagagaatataccatgtgaatatctgtgggaaaagactttccaagcaaaggaaacctcatgctcaaaggccttgaagcaggagtgtgcctggtgggttttagggaaggtggctggagtgtagcagtcaaagaaaaaagggatagaaagtacagccagaggtatggcctgaggccagggcatgtctggccttgcaggcaacagcaaagactgattttattctaagtgtgataagaagccattggggagatttgaaagcagagagtggaatgctctattttatgttttacgaagattattctatttgctgtgtaaagaatagaacagaaaggggcaagagaagatgcaggaaacccaattaggaaactatttcggtctgttcctgttgctgtaacaaaataccacagactgggtaatttataaacaacagagatttatttctcacagttctggcggctaggaagtccaagatcaaggcaccagcagatttagtgtctggtgaagactcactttctgcttcatagatgatgtttcttactgcattcccacatggcgaaaggggaaaaagggccaggcagttctctgaagccccttttacaagggcattaatcccattcatgagggtggagccctcatcacttcccaaaaaggtctacctctaatacccatcaccttggggtgtgagtttcagcatatgaattttggagggacacatacattcaaaccacagcagaggccattgcaggcagaggttgatgatggcagcttggtctaggtgttgggaagaaggcggtaaaatggggtcagtgacgtgatacattttgaaggaagaggcttgtggtttgctgatgtattggatgtggggaatgaggaacagaggaatccaggatgattccaaggcatttgcctgagtaactgaatgaacgatgttgcttctactgagaggagaaatactggcaggagggcagatttaagggagagaatcagttttggttgtagaaggggagaatggtaaagaaagagcaattagcagggaagcatatattgaacactatgttaaaattcatagtgctgcacttcactccgcctttctcttgggtagtggaggccatttgaacttccagggcttgattggcaactccccaaaccaggtgagtagtggtggaaataaatccagaaataaacccaaaatgtattaaagacttaaatataagacctgaagctgtaaaactagaagaaaacagaaaacttccttggcaatgatttttttggatatgacaccaaaagcacaggcaacaaaagcaaaaataaatggactaaattaaatggaaaaatttctgcacagcaaagggaaaaattcaacaaaataaaaaggcaacctatggaatgggagaaaatttgcaaactaaatatctgataagggattaccatccgaaatatataaggacgtcctgcaatgcaatagcaaaataccaaataacctgattaaaatatgagcaaaagatctaatagacacttctgcagaaaagacatacaaatggccaacagttatataaaagatgatcaacatcacaaatcattgggaaaatgcaagttgaacacacgagatatcactttacacctgctaggatggccattattaaaaaatgttaatgaagatgtgaagaaaagggaatgctggtacactgtaaatgagaatgtaaattggtatagtcattatggaaaacagtacagaggttccttaaaaacttagaactaccatatgatccagcagtcccacttctggatatcaaaattaggaaggaacagaaattaggatcttgaagagatacttgcacttctatgttcattgcagcattgttcacgatagtgaagatataaaaacaacctaaaagttcactgttgaatgaattaataaagtatggtgtatacatacaatggaatgttatttagacttaagaagctatgttgtcatttgcgacagcataaatggacctagaggacatcatgctaagtgaaataagccagacacagaaagacaaatattgtatgacctcattgtatgtggaacatactatagtcaaactcacaaaagcagaaagtagggtggtggcttccaggggtgaggggagcggggaagaggaaatggggaggtaagtgatggtcaaagggtacatgtttcagttatgcaaaataaataaattctggagatcactatacagtatatagtgcctaaagctgacaaaactatattgtatacttacaaactttaaactttgctgagagggtagatcttctgttaagtgttcttacacacagacacacagacacacacacacacacacacacacacacatatgcacacactaatcaaggaggtggaaggaaactttaggaggtaatgcatatgtttatggccttgatggatatgtttatggtgatggtttcatgggtgtatatttattatatcatcaaactcctggagttgtatatgttaaaaatgtatagctttttgcgtgtcaatcatacctcaataaaacggtttaaaatgtaattactttcttaaaaaatgcctcgtacagtctggaccaggttaaaactttattctcacatccaattcattgcccatctcctttgctctcctggttgacagccaggcttttcctgggaaacagtgatggggaggccccgtgtctgcccttgcccctcttgccatctctccccatgtcttttctccctcttgaattgcttgactaggcagatgtctaatgagggaaggagatgtcagttaccctgcatcttcctgttatcccaagctctacaagtgatttctttgaagtttccatcccacacttgcttagagaggtgggaataactcctttctccctcaaggcgaagaaggaaaaagacatgattttctcccctcccactgtgattcacagtgtttcttctttcactttgtctcctctctcttggtcttctgcttatatggtcctggtagtggtgggttcagggagacctggatgagggtggcagaactgactggacagtgtgttagtccaggacctcctagaagctgacatagaaataggaatagatgtgcaggaggaaatgctttttgtgatggttacttttatgtgtcaacgtgactaggccatggggaacctggatatttggttaaacattatcctgggtatgtctgtgaaggtgtttgtggatgagattaacatttaaatcagtaagctgagtaaagcagattgcactctctgatgtgtatgggtcttattcaaccagtttaaggcctgaatggaacaaaaaggctaccccctccccgagtaagaataactcctgcctgactgccttcaaactgagaccttggtttttctttctgccttcagactgaagctgaaacatgggctcttctgggtctctggcttgctgactcaccctgtagatcttgggacttgtcagcctccataattgtgagccaatttcttataataaataaatataaaactatataatataattatatttatataaaatatttatatgaaatcattagcatgtctaaattttaaataatcctcagacaaaccacaaatacttcaaaatcgaaatgagaaaggggatataaccacagatacaaaagaaattaaaggacaataacaagacaagaaaatttttttttcattctttttttctaatgtattatactctaagttttagggtacatgtgcacaacatgcaggtttgttacatatatatacgtgtgccatattggtgtgctgcacccattaactcatcatttaacattaggtatatctcctaatgctatccctccaccctccccccaccccacaacaggccctggtgtgtgatgttccccttcctgtgtccatgtgttctcattgttcaattcccacctatgagtgagaacatgcggtgtttggttttttgtccttgcgatagtttgctgagaatgatggtttccagcttcatccatgtcccttcaaaggacatgaactcatccttttttatggctgcatagtattccatggtgtatatgtgccacattttcttaatccagtctatcattgttggacatttgggttggttccaagtctttgctattgtgaatagtgccgctataaacatacgtgtgcatgtgtctttatagtagcatgatttataatcctttgggtatatacccagtaatgggatggctgggtcaaatggtatttccagttctagatccctgaggaatcaccacactgacttccacaatggttgaactagtttacagtcccaccaacagtgtaaaagtgttcctatttctccacatcctctccaggacctgctgtttcctgactttttaatgattgccattctaactggtgtgagatggtatctcattgtggctttgatttgcatttctctgatggccagtgatgatgagcgttttttcatgtgtcttttggctgcataaatgtcttcttttgagaagtgtctgttcatatccttcacccactttttgatggggttgtttgtttttttcttgtaaatttgtttgagttcattgtagattctggatattagccctttgtcagatgagtaggttgcaaaaattttctcccattctgtaggttgcctgttcactctgatggtagtttcttttgctgtgcagaagctctttagttcaattagatcccatttgtcaattttgtcttttgttgccattgcttttggtgttttagacatgaagtccttgcccatgcctatgtcctgaatggtattgcctaggttttcttctagggtttttatggttttaggtctaacatttaagtctttaatccatcttgaattaatttttgtataagatgtaaggaagggatccagtttcagctttctatatatggctagccagttttcccagcaccatttattaaatagggaatcctttccccatttcttgtttttgtcaggtttgtcaaagatcagatagttgtagatatgtggcattatttctgagggctctgttctgttccattggtctatatctctgttttggtaccagtaccacactgttttggttactatagccttgtagtatagtttgaagtcaggtagtgtgatgcctccagctttgttcttttggcttaggatggacttggtgatgcgggctcttttttggttccatatgaactttaaagtagtttttccagttctgtgaagaaagtcattcgtagcttgatggggatggcattgaatctataaggtaacattcctgaacatccagaactcacatatttttaaaaacactagatgacttaagaagtgcttaaaaaacttggacaaataacatagaagaaattaatgaagttgttaaagatctctttaagatcctgagtcctgatgatttcatagtgaagttttttcaaatattcaagatatttcagatgtcattcaaattagcacagaagatagaggaaggagaattttcttaagtattataataattttaacataccattgatgccaaaatctaacacaagaaaattccagacctgtcttatttataaagatataaaattcctgaataaaacattgtttcatagaatttagcagtgtctttaaattaatgtattctaagtggggttctactaaggaataacaggattattcaatgttaagaaacccataattataacttgtcatattgccaggccagaaaatttaatatctgaatgaattctgaaaaaatacagatataatttcacattcatttttattaaaatttgtacttgagaggttttttttcccctcctgacatcaactaattctgacaccaactaggtatcctacaattcaacttgattctaacactaactacctggcattagctacctggaattagcacctaaactgcaggtttaggcactcagtctcacaagactgtcctcacttcagatgccagtcacaagtgtcaggtcgccaggttacccacacttctgtccaacttggctacaaagtcaagggttgccactccccattccctttaggcttgttaatttgctagaatagcttgcaaaactaagggaatcacttaacttttgtttaccagtttattttggagaatacaaatgaaccgccagatgaagaggtgcatagggtgaggtctggaagggtcctgagtacaggagcttctgtccccatggagctaggatgtgccaccctcgcagcatatggatgtgttcaccaacttggaagctttccgcttccaaaaaatcccctcatttaggatttttttttttatggcagcttcatcatgtaggcatgattgattattaactcaatccccagcccctctttcctgggttgtggggcttaaagttctaggcttctaaccaaggcttggtctttatggagacctgtccccagtctgaagctatctagaggctagtcaagaattgtcttactagacaaaagacagtcctattattattatcactcaggaaattccaagagtattaggagctccaggcaaggaaatgagaagaaggcccagatgctttttaataatgccttggtagttaataaataaaaaattaggtaatcctcattacaagaatgctttatggtgaagcaataaaaacaatcttgttaaatttaggaaagaggaaatgatactttccctcaactctcttatagaacattgttctagagatgcttaccaatgctattagagaagaaaataaaaatgaggtagacatctggcaaacaataagataaaatgcttatcccttgcagaagagattattagctacctggaaaacatgagagaatcaataggaaaattttggaagtgataaaatttaaagcatttggttgtaaatgcacacacacacacacacacacacacacacaaattctcaatatgtcaacagtaagtgattttaaaaatttctttacagcaataggttcatttttttttccctgtgaggaggaatcctgtctattgtaagagggaagattgaaacatgtttagaagaaacagaggagacaaagagcatgtcttggagatgttgatatccttagtgcctgtttttattaagccttaacttcattctgtccttaggtttcatgggatgcctcaaaattcttataataaatcctctttcagcttatagtggatttagattggggttctgttgcttgcaactgtagggagcctaaccaatgaaggcagatttgttagaaagcacaaaacacaatgaactctttgcttccctagtccacaacagttttaggatgcataaaatatagtgtattcagaaatgatgaggggtgagtgcataggtaaatgcatatagacaaaacagagcctgggggaaaattacaataatcttatactattagtctccccttcagtagcatccttgggatcttgggtctcataattctatttccttttaaaaagtcgtgcacatactgtcaacagccattaaacttgcttgctattgctgtcccttgatggcctcagtcaatagccccctatatccttgcctgcatagtcgaggctgttcttaaactgaggactatttaggaggcttacccttctactactagctctctcagctaggaatgattcttcccttatcgtgcttacaatgctcaggaagccaaattcttttaactcagaatcagtccctttctaatctgggacatggctggtccggaatggctagaagtttggagtctcaatcccaaacccaagggtacaaccttctatctcaaagtgttttccaggaatataggactcttggatgatttgctctggcagcccagaattctcaatgtggatttgcagattaggtttttcttcactgttcttcccacaatgatcaggcagtatatttaacaggaattactttacaactaaagaaaaattaaaaccaagacaaggatcccaaagctatataagaacaaaagacctgcttctaactggaagagaatagaaaaattataaaatctcactgtagctcatgatagagtgttccctacctatgagtatatgccatttcaataatttttaatcctttagactttgagtagggcagtctgaatgtaagcatcattttgcattaaggccagcagggatgaaccatagagaggagaaacattattgattgttataagttctcagtaaaaaaaataccctgaccttactctactgcctttccttacatatcttctgggtgcataattttttgtttgaaatctgcaatagggatggaggcagcatattagttatgatttttaatgatgatgcttataattatacagcaaaaaattgagagattactatgtgccaataactttaagtttattatctaattgaataatcacagcaactctgttattaccttccctgttacacgaagagaccaagattgggagcaggtactaaattgtcccttggtccaacaggggaataaggtagcaaatcatgtgaacctgaatggtcagattctagactcctggttccatcctcagatggctgtttggtggccttgactccctggattctagaagcaagcctatggctaatatccatgatatagtttggatgtttatccctgcccaacactcatattgaaatgcaatccacagtgttggaggtggggcctggtgggaggtgtttggatcatggttgtgaatcccttatgaatggcttgggccatccctttggtgataagtaagctctcactctgagttcatgagatctggttgtttaaaggtgtgtggtacctccctccaactctctcacttgctcctgctttcaccatatgatgtgcctgcccccgctttaccttccgccatgattgtaagcttcctggtccctctttagaagccaagcagatgccagcaccatgcttctatacagcctgcagacccatgagccaatggaacctcttttttttttttgtaaattacccaatctcaggtatttatttacagcaatgcaagagtagcctaatacaatccataacttgaagtttcccacaactctagatattctgggcctgcagctactttgggttcatgaacaaagagctgtatttcaggtgaagtattcaaaggagaggcatttccttatatttcagctcaatattttggggtgtaaggccaagcaggtatagacacacttgactgccaaatggggtgttagtaagatgcccttgctcaggacagatctactgatgtggaaagtgtcaaggaaataagaatctttaactaggaatttggctatcattttggtcaaggaagataaattttcagatcataaagggtaaagttaacattgataagacaacactcaaaggtagaagtttatagatagctcaaaactagttgaaataattttagcaagatgagtgatctctgggaaattgcagacccttgaattaatgatgctaattttcagaaatcctagaggagagagatgcctgaagcctggaaactggcaaaaaaaattccatttttccttaagggaagaaaggtgactcaatcctgggcaggaatctagtatgatttatttagggcaagattgtaaacatattggagatcactagaaaccaatattgactcacttagaataagttataggaggataatatcatttcctttttagatagtgtcactaggctctcagagtaggatagtgacatatctgttaggaattgtacttggctttgaataacagaaaccaaaagatgagtggcttaaacagttaagaaattcttcttttttcctgcaaggagaagtctagtagcaggtggtctctagcattgatttcagagacccatgactttcagggctacagtgcctgtgattgtcttgacttctcccttatggttgcaaaatgactgctccacctgccacatcacatcagtatttcaggcaggaaaggcaaagaacaaaggatctgtgtcatctgagctggctttttaaaagtggttttcctgggagggctacccaataacttccatctcattgaccagaactatgtcacatgaccactgttatttgcaagggaggctgggaaatatagtatcttgacacattgcctcttgacaaagccaggaagcataggtgttgggtgctaaactagtaatctctgtcccatgaagcagataactgatctggctttcagcagaacataacaaaaaaaaactttagatatccttagagagaaaactgaaaatacaaatagggtcttagaggatcttggaatactaaaaactagtttacccattcagagcagataaatgaattgatatcattttgtggggaggactttattggagtgcctatgggctctatcatagccctgatcatattagcactttaatgatttgaattgaagacatggaaaagccacttgcgtgatttgctggtgaaataaagttgaaagagaaaatgtgtgaagaagctggctgaaaaaatcagtatctttttagatcttggttgcttaagtgcggccagattttattaggtgaatcagcagaagaataagggagggtcctgtgttgggttgcagaagcggtggtccaagtgcaggatcagggagctctggcttagtgaagcaggtctgtaaggtcttgtgggcttttagctcactcttgactttgtatagtaatcaggatgatgtggatccacaagtcccatttaccctcaagccatgttaatagaaatatcacaagagctgtgatccagggcagagaatgagaattcagtggaaggagagtgtttgacccagagatattcaggtggtacattaacctcttaacttatctcaaaacattttagagattaggggaagtatagttgaaggaagggggcctggggtgattaaaaccatttatctatggaaaactgcaggacttggagacatctgaggagctgaccaaggatagaataagatatccttggagatggtgagttctctgtcattggaaatattaagctgggaagggagcctatagagatgatttaagcattgggagggtaaacagactagttgcactgttacataattccctttggctcatgaggctgtttgattctccaaattttctggtgacccctggggtcacatgatcagtagatatactggtcaaaaagttacatagctgctggcctaaggctctcaagaggctgatgagacactgagcccttccaggaggggctaaaacactgatttaaaaccctgagatgaaatatattattttcaagcagtctataggtttggccacagaaggataaattgcactggaatttgacattagctaacccagtgggaggttgaggggtcaacagaccatcctgtaaccttgagtcttcttgaaccttgggaaaagctggctctgggctggagatgactaggtgtggccaggaccttgattttccctctgcctcattgtggggaaaccatctgtggcttcactatcattagtttacatgggtatgactatggggtgtgaatgaaaagagcacttaagttacctaaacatttatcgagcacctactatgtgccaggcactgtgctggagccagggatgtggagaggaatcaaatacggtccctgggatggaggagctcacagatcagtgatggaggggaccaaaaaccaaacagatcctaataggcagagggtctcgatagacacttataccaggtgcgaggaaatctgttgtaattactcatgcctggaatagggcatcaagggggccttcccaaaggtgagctgtaagtggggaggtgctttagatagataagagcacaggctggcctttcctggtggagggacagcacatgcaaaggccctgttttgcaatgtcctggtgtattctgggaatggtaaacttttctgggtggctggaagagcaaggttcatggtgagcaaaaagactcagcaaatttgggactgatactgaatgccatgctgagacatttttactttgctctgttggcattcaggagtcaccccaggcttaaaagtaggacaaggaaatgatcagatgtatcttctaaaaatcacctcttggttttgtggactggacagggatgaggctgggagcaggaggccagctggacacagggttcctgcatgggctacttctttctttgccaccatcaggctgttcccagattggatgatccatggaaagatatttgcttcttcatcatttcccctttactttcaggacctcatcagcttgggagaagtgctctttgcctgcttagtaatcccatgtagggttatccaagagaaccccagggcatagctgaggacaggggaatgagtcactatttgtcattgtttgccacataccagatactttacttacacaagtcctttcatttgcttctcaccatggctctgagtggttgcaattgtgcttcccaagtggaaaatgatgctcagaccaaactcaaggtctcagaacctgtaagtggcagagctgggatttgaacctgcctctactgactctcagtccagtgctgttggctgctaagggtccctgtgtttgcctccccatggggctgctggggaaggctgtgtgtttgtgtgcacctgaagctgggcagcctgtgtgtctggagggcccatcccacccggaggcaaggcagggaggcccatcagctctctggtggctcccctttgctgtcttcgacctgtctcctgcacagattaattgctgctcacccgaggtgtgatgtttcctggttccctgttccggcaagtgtgggttagtggggagcggtgcagccatgctgatcgggagtctgcactggcacagctggcggcctgcacagcaccctcatcggaaagtgatccatcacccgacagtcgtgttgccatccaggcccagctgccaagctggcatcttgaggcctccccaggtgtgacaggcctcccggctcagagcctcagggctgggcctgcgtgtctgccccttgcaggactttcaaaggggagtgggagccttgcctgactaaggcttttactcttggcagctttggggaaagcccccagctgaaatgcggtgtttccagtggggaaagagtaatttttgaacatagcccctgttttcccactgaaagctcccaagaggagcaagaaccccagaggcatgatgcttcttagcacccccaagtagttccacagagactggtgtgtccctcatatattctcagctgagatggagctggaaagaccaggcagtgttggggcaaggccctgccagactagcaagtgaatttgcgtggaaggagagaggtcgggagcctgcctacgttcaaagggtcctcgcggttcctgctcctgagatttaggtgggattaacttgaccttctagttttaaatcagtacttcttaaatttggccatgagtcaggatcacctacagggcttttaaaaatgcagattgctggccccaaccccagtgttttcgattcattaggattagggtggagtcctacaatttgcatttctaacgtgttcccaggtgatgtcaatgccactggtccagggaccacactttgtgaaccactggttaagggggaggccaaccccctttttaggctctttaagaatttgcagaagtctaagctctcctggtttctttgggttgttagtccctgattaattttcttgtctccccaggccacatgggctgtcctagggctaaaatcagagataaagttcagttccttctgatatctaacaagagcccatgagggtgtggcaaccaaatttggtgaagtccggggcagtggaagcaggatttctacacgagcaatactgatagctataattccatttagatacttgctgttttaattatcctttggccacgaggcctttgagagcacaacctgagatgaaatatacgaaagatctggcttacagaaggtgtttcatcaagcctcattttcccccatccatctctgacttactagtagaggcagatctggatgcaattgagccccagaagaagtttggggaggagagtcttgagaataactcagtagcagttccctgttcttatagcccaccattggctgaggataaaagagatgctctctcctgggtccttaaatgcccccagaggcagagctatcttctggatttggctcctttcacattttgccaatgccaggagatggcctggctggtaggtcccagctggttgaccttcataaagactataggctgctcaaaccactttctttaggcaagatcctcaacttacctttccctctcatttcatctcctggcgtttcatcactgtccagagctgactactagctgctggatgtcttgcaatggcaaagtggtccccatatttttcagaactttgggagggaggcaagggcctcagatacctcctggggcttgaactccctgaaggatttatagatttggttgggagcttcaagttgagtcccaatgatctgtgtaaccataaccaccagtgttccaccctccacttcccacctgttacctaccattttcaagccttgtttccaacactatgcataggcacatgtccaagcttagcttttgtccttttgaattcctaagaggaatcatttaccctgttcttttgtcttagtacgtgtgattctgcaattagataaatagtcctgattccttccggcacaaacataagaaggtacttcaggagaagagacaagaagtatttttttccagagtatttattctttgcatgtattatttgctccctcttatccaagggggatacattccaagaccccagtggatgcctgaaaccatggatagtactgagctctatttttacgatgtatttttcttttttcttttcttttttttttttgagatggagtcttgctctgttacccaggctagagtgcagtggcgtgatcttggctcactgcaacctctgcttcccgggttcaagagattctcctgcctcagctgcccgagtagctgggattacaggtgcctgccaccatgcctggctaatttttgcatttttagtagagacagggcttcaccatattggccaggctggtctcgaactcttgaccttgtgattcacctgccttggcctcccaaagtgctgggattacaggcatgggccactgcgcccggccacgatgtatttttctattcgtaaataactatgataaagtttaattgataaattaggcacagtaagagactaactaatgaataataaaatagaacaattattacaatatactttaatgaaagttatgtgaatgtgatctctctttattaaaatatcttcttatactgcagatcttagcaatctcagcatacaatttttttcttttccctagtaagtagagaacttgcatcttttcacttaaaggaagcacttcatggcttctttttggtgtatctgaattgccagcatcactactcttgtgctttgaggttactcttcagttaaataaaggttgcatgaactcaagcactgcgatacctcaacagctgatctgataactgaggccactactaagtcactaatgcgcagtggagcttatatggatggatatgctggacaaagagatgattcacatcctaggaggaatggagcaggatggtgtgatattttgtaatgttactcagaatggcatgcaatttaaaacttatgaattgtttatttctggaattctctattgttttaagttcaggggtacatatacaggatgtgcaggtttgttacacgggtaaatgtgtgccatggtggtttgcagatcatctcatcacctaggtattaaacccagcatccattagccatttttcctgatgttcttctccctcctccctcctaactctctgacaggccccagtgtgtgtccccccaccatgtgtccatgtgttttcatcattgagctcccacttgtaagtgagaacatgtggtatttggttttttgttcctgcattagtttgctgaggataatggcctccagctctgtccatgtctctgcaaaggacatgatcttcttttttatggctgcatagtattccgtggtgtatatgtaccatattttctttatccagtctatcattaacgggcatttaggttgattccatttctttgctactgtgagtagtgctgcaatgaacatgtgagtacgtgtatttttataatagaatgatttctattcctttgggtatatacccagtaatgggattgctgggtcaaatggtatttctgcctctaggtctttgaggaatcatcacactgtcttacacaatggttgaactaatttacactcccaccaacagtgtaaaagcattggaattttctgtttaatatttttggacctcagttgagcaccactaaccaaagccataaagagtgaaactgcaattaagggggaactattgaaagtgggatgtaatctttattccctgttgcatcccatgcttgcttatggtaccacctaggattgcaatgatagctaactcccaatccccccaaatcattgcatttggctggagttgtgggtatctttgctagctgggtactagcctctgattattttttccagctcttttaagggtagggggatgtgaggcaggtcaactataatggaaaggtcagagtggctggtatagactgcttctgatagggcttatggttagcaaagagagcagtttttacattaactaggataattttttcacaaataatataaatttaagacatgggtgattgcattaatcacttttgctttctgtaaccctctaaagaggacattccacaaggcatggaatggaaagaggaggttacagtgtgacacttgaacttaaacccctactatagagacaggagatagaacattggggcttttgatagctaaccctgagaaaatgcctccatctgccccaggcttgccctgcctgcagccttaggagatggtagccccaccaacctttcctgtgaatttgccagtttctctttgcaccaatgcataacgtcaaatgaggggcccccaccagggtgcctgctgcttgctgccaggcactcctgatgacttcagctaatttctgaatctggaaacattgttgacaatgtgatttctgaaacgtgaaaggcgttatctcattgtgccatctgcggcatgtctgtctgagtcggggcttccgctgccactctgcccccttgcagcacctctcactgctccgtcatcatctcccacagctaattgctccaaactgacaaggaggcttttttcatttagagatacagggaaatggaactttcttgctgatgtttcctagtcaagcatgctttttggaattctaatttgatcttttggttgcgggtgggtgagtggggtctggtttcagcactgggtcagggacagctcccagagaagaaggaagtagcacagtggggactagggtggaaatctcttctgcctgcaaggccgttaattgggaggtagtaaattctctgtcactagaagtgtgcaaatggagatgaatttttttttttttacttgcatggaaagctctaaatggagccagtctttgaatgggtgatttcttctagctcaagggatctcctggagccagttatatccagggggaggtgtgaggtaggggaggataatcaaagggtcagggctagtgtagtagttatccatagctgtataacaaatcactttagtactttaatagcctgaaacaacaataatcatttattttcttgcatggattttgttagtcattaatcaaggcagggcacaatggggattccctgtctctgcttcaagttgtctgagacctcaccttgaggacttgaagcctagggtcctagaatcacctgaaggtttgcctgtggctgaggatccattgcaaagtggctgataagttggtgctgactgttgatgggagacctcagttcttcctccacatgggtttcttcagagggctgcttgaatccttgtggctttatggctgtctttccagaataagcaatccaatgccatttatgatctaccctgggaagtcatgcactgtcgcttctgtagtattcttttggtcacagaggtcagcttgattcagtgtgggaggaaactacagaaatgtgtgaacaccaggagtcaagggtccttgggggccactttggaagctggctattacatctggtaatagagagtgaagcaaggcacacagcttctattgattgagacagtgaagacaagttctgagcttgctcatattttagaagcaggaagttggcagagggcattaagtctaagctaactcaagtttttatgagacttgttctcctgtctctttgcacaggcgtctcccctccagaggcatctacgctgggctttcacattttgcttccagcactgacctttttcttgagcctttgattcatactttcaactcactccaacctctctggcctccatcagcttcttgaatatatcgtgctctttcatacttcagggcctcttcacatgctgttccctcggctaggaataccatccctaatctgtcttcatcactctgtcactggttggtttgtgttcattgctgagatctcagctcaaatgtcactttctctgagcagtctttgcttagctctcctgtggcagattatattttccaaagatggccacactaatatatctcccatcccaaatgctttttttacaatgtgatgttgacatttctccatcaagaggtgggtcagtgttacattatatagaacttggggtggatgtttgtaactgtcacaatcagtagaaagtggcagaaatgatgctgtgtgacttccaaggctaggtcttaaaaggtagcatagcagctacctggagtgctgtctgtcatctctgttcctctcttcccttgtccatggtaccccccaccattttgtgaggaagctcaagtagcacctgcgaagagaccaccgggagagaaatttaggcctccagatgacagccagcattgcccatcgaacatacgactgaatgagagttcagataatttcagctccccagtgtttgagccttccagctgagatcccagacatcatggagcagagataagtaacccccacaatgcatctttggaattccaactaaaagaaactgcaagagataataaaaaatgaatgtaactgtgttatgaactgaatattggagttatttgttatgccatcaaggtaactgatatatctgcaggctccaccaggtttccttataatgtgctgtcctagcttccagtatgtttccttcatagcattcttcaagagtttgcacttatatatgtgacttgcaactaatttcaattcattcccatctgtttcactggacggtaaaatgtatgagggcaagcaccatataaattttgtttgcaaacaccctgctagagcctgacatataatatgtgctcaataaataatacgtgctcaatgaatgtgttaaatggatacatcaatggataatctttctccctgaatttgccatagatgccccaatctctgcacatacgagttgaagacacatctttgtcttcctcttacatcttgatgaaggcaccattacctcttcagatgctcaaaccacaaacttggaaatcatcttggtcttttcccatctttttactgactcccataaaaggttctgggtcctgtgcattctaccttttaatactttattattccacccccatttccccactttagttcagcttcttatcatttccttcttgtatccagtcaattgactcctgttcagtttacttccttccaatgcatcatccaaactggcaggttgacctcttcacactgcatgtctaagcctgtcactctttggatgaaaattgttcactgacattattgtccttacaataatgcccaaagtcctcagtagcctcctcaagtcatttatggagatgggtgtgttataaattgaaactccttgctgtggcctgcagttcctcaatgatctgtcttgagatgatctcttctccctcatctctctttactttcacccccagagcacatgctgtaaacacatcaagatcttgaggtttatcccaaatcacctgtattaatttggttgaaaaagacagaaattccacttgagctaacttaggcaataagagttcattggctcacagaatctaagaaaacttttgcagggaaggcaggcagaagagtgcccaggagtaactagatcaagaagtcaagcagcttctacatatctccagtgttggcttcattctctttcactacagaagagcttttctatgttgcttatttattattgcattaacaagcatttatcattattatctctcatggttctgagggttaccttggcacagccagttggctaatcctcagttttttcatgtggttgccatttgactgatgttggctgcagttgaagtcatctttcttactctcatacctggcacctgggctgagggatgagatagctggtgctcctctgctatctgtctctaccactctgtagtctgtctatgtggtcactctagtatagcaatttcagggtagccaaaattcctacatggtggctcaaggcttcagtgatgggtgtccgaaggaaaaatggcagagggtgcatggtccttcctaacacaaccttgaaagccacttctgccatagtctatttatcaagttagtcaaaaagtgttgcctggattcaagggaggccccctcttgatgggaagggcatcatgtttgaacatcaccagctttgctactggaaacaattcttgagttcatcatcttacagtttcagccaccacttgatcttaagttaaaatcctctggtggggatctctgagcctatcttgtgttgggtgactcaagcccagtggactgtaagagagtgaagtcttctagaaatatggcaactctttcatatggatgagtatggcaggttttgaagtggaggtggtaccaggtaggcagtacagtgaatgatttgtacatggctccaaaatctgaacatagcaccttcccatatttgctcaagctgtgccttcccaggagcaccttttcttccttctttccatcctgttcacttttctttgtccttcaattctcatctcaggaaccacctacttcaggaagtcttatcttttttgacccccaaggttagtttatctatttgctcctctcattaccaaaggtatgcttactttcgttttaaaactaattacactagctcaaaacctacctgccctcttttatcatctgtcttcctcaccaaactgtgagcctctctagggcaaaacttgtattcctagtgcctagttcagggtccagccctttgtaggtgcttgatatttgcttttggaatgagtgaattaatctgagcagtaaggaggctgcccccagaatgaactgctgtgtcctctggtgtgaacatatggcccagctgctgtgtgctggggtaaaaagaggccaacttgccccacagctgcctggggttgagcatctgcaggctgttttgggagctggcctgacagatggaaaagggctgaagtcccccaggtccataagttgctcactccttttgagcctctctgcagctgaagggccattgggcaggggcatgaaaacatctgggagaggaggttgttccaggaaagcatctacgccaggtgtcaagcttcctgcagatgaaataaccagtcctgggctggagtttctgacatctgctcgtgtgagggcttgaggtcagggggccctgagagatgatgctgagaataggcttgattgtttggagcaagtcccccaaatcagagatttagggactagacagacataataaaaatgagagtggccactgatggagtacggactatgtgccaagcaccatgtcaagctcagtgcttgtgcataaactgcttttaaccttaagaggcaggaactcctattatttctattttataaaagagatagaagttccgagaggtaaagtaacttgtccagaggcccacagctcaaaaagggtagagtcggggtttgaatctgtgtttctgactgtgtgagctcaactccactcatggtgctctgattaaaagggcccagactcccagtgagaggtggtgaaacagactccttcagatacgggttctgggaggatgttggctaagacatagagtctttatgtttctgggtagttgggcccagtagacttacctctgctccccaatatagaccgaagccaaggacttgggtgcatgtaatttttttttttcaggatatgactccaggaagcacagtaggaagtgtgggcatgagaccaggaaaggaaggcaggcaactaagggtacactaatgagcctggtgggacaactgggctgagactttctgaggacctgtgtagagctcaccttataattgttccacagacaggaaggaagctgagtgtttgttcatctgttacagtgcctcattggttgagggttgtttccaggggcaagatctccctggctgtttccatctgatcctctttatccaacatgagctgaacctgctccagttacaaaaggaagctctcaggcacagagatggagatgcttggggtaggaatccattggtaagtacggaatctgtctacggaagctgcaggtgactttgaggttgcaccatagtgatggggcaagccaccaacagtgtctgctacactagccctacctgtgaatgcccctacaaatctgtccttcctccatcaggcatttctgggtgctcccgggaggtatcttatatgtgttcttaatcttgatcagttattgcttcctcctctgggtcgtgctgggcactatcattttccccagccctgcaaagacaacaggtgctgtgtcattctcattctctgagtattagtgggttctttagactctcattcccagggaatatctgctgcttgctgggcatttccactacatctgctaccttcaacagtttttcttttaaaccatagtcctctcttttcctcatgtagaaaagaggcctcttgggaggctgtggtgggaaatctgagagacaaccactgccatgttgtacttgaaataccccagacctctgattggaagtcaacagcagatctcttccctttccttcagttctagcacagtgagatgcatgggcaggggtacagatggttcaggaagctctaagcctagtgaattggttaggaaaatccccagtacatttgttttgtatttttcttcaaaatgagggagttggcaacaaaacgtgtggaaaagtcattaggttagttcatgcctcattatgataacttaggggttttcagaataattccttcatttatgtgatgaatattggttgagcacctgcaacatgccagataccatcctacttgttgcattgcatgtcaggcagggcaggcaaagggtgacacaatggactctgatcagacaggaaggcaaggaatctaccagcaggaaaagataaaatctgaggtacatctagggaaacatagtataaagatgaagttcaaggtgtggctataaaatcctttgcaaagatctcaggaggattgaaagtggtgcctcagagagccatttagtaaataaaaaagggctaataagaaaattaagggtatcgtctctcagcaatctcagcagtatcccaagatagacaaaggcttggagatttgtaagcttgtcctttgtctaatgacatgaaccctagtttcatagtagaaccacaaaacttttaagggcaatgtattggcagaaacactgcctgctaggactgaaaggaacagaagtagtacaagatgaaaaagggcctttggacccctgtctatccctgaaaatctctgtttgcagagggtaagagaagggaagcacagtcctggcctctggcctcacttgggagactgtttctgttccctggctatgcatgaagaatgttcagcttcccattctcctgtagaatttgagctcttcacccttagtacctaattatagttccagtgcctggtgaaccttgagcttcagcctgtctcagaattgtaaaattttcttgcatcactagtaaagagatttgagtattatttctgagcatgatcatggctattttaataatttaatgtactttatgtgccgtttctatgagtttgggaaagagaacagatcattctgtgacctggaaagcagtccactagtatttaattttcatatctcattgaattctcactataaccctgcaagagtactcttattatcttcctcctttaaatgagaaaactgagactcaaagagattaagtgtcctattcaaagtcattcatatagtaagtagtagttgattcaggattcaaacccaggaaatatgacttcggagctcatgcctttaaccactgctgtatatgacagaacttctcagagcctttaatatgctggtgggtattattaatgtccaaaagtggttatgcagaatttcccaaatttatcttaccctatcccttttgagtttcttttactactacagttctaaagacatactttgtgaaatattgcagagattgagcagataaaacttgagaagttattgaagtaggtgatgtaatagtaagcttttgttaaatgaggccatggtaacaaattcttcaaatatcagtgctttatcaaacaacaagattttatttctctttcatgtcacatgttagaactatagtttggctgcaccttcgctcaatatgtctttcattttggaacccaaggagaaggaattatcctaatctagaacataccatcttcatgacagacagaaagaaagagcaagagatggggtagaaacttgcaacacatcttaatttcatggatatggtatatgttacatttgttcacctgccattggtcaaagcatgccacatggccaaaaacaaagtcaatgagatgaaaatgtgtacttcctttactgacaatagaagggtaaataattccaacaataatgcaatctaccatagaaaacagaaccactgagagccctcaatcaaacaggcattttcagtagcagagaggagggaagttggaagctgtactataaagattttaggaaaagcacaggaggtgtgataatatgagacaagagaaagcatgtggctgaggatttttatggtttcatgtggctatgtgggtgagtaacagagtctgtccagcatgtccagcctaggacataggagaaatgtgagggtacctggatatcctgtctggtatcaacacctgccagccacccatgttagagatgtgttgctggttgctcattcttatatgcctcacacattctgagagctctttcaatacagtttttgaaactacttatatatcttcatttactttccttccccctttcaattgctccctaatcagcagtggatgatgtccaccctataacctgaatgtgatgtcatctttggtatcgtttaagaaatagcacttaacagttgttaactatgggaatccatttttagaacactgcttatcttctccttctttacaaaggtgattaagatttatttttacttggatgaaaacagccttcattgatttctgccccatagagagatgacaggacacttgcattagtcagagaggaagttaaccctttacttactgccactgaggcaggctacacaattcctcccagggcatgtacagtgggcaaacagagtcaaaattgtcttgttttgtacagaagcagcaaacccagaaatcagagaatgtgacttctctgtgctcagtatggaggcgattctgagaattccaacttgtgggaagctttcttcctggttgactaccaggggagagtgtgactgactccaaaccagctctgtgagccttcctttcttttagtatgagagctgtacttccttcctctccctcacacacaccctggtacgtctgcattctgtatccttgtatgacagagacacttccacatttttagatgttacagcaacaccctacttctaggtaccaagatctatattgcttatctcatacttggttgctgaaaccaacacaaatttattatcttatacttctggaagccagaagcctgagatgggtcttagggggctaaaatcaaggtgttggtggggctgcattccttctggaggctctggaggagaatccacttccttggctttttcaccttctagaagctgcccacattctttggcttgtggccccttccattttcaagtccagcaacaatggctagtcaagtgtttctcatgatgccatctctctagttatgattcttttaccaccctctccccatttaggaacccttgtggttacattgggtccatctggataagctaggatgataatcttatcttaaagtcagccgattagcatctttaatttcacctgcaaccttaacttctcccttgccatgtaacctaacctcagaggtcccgaggattaggacgtaaacatctttgggaggctattattctacctaccacaacatctaaatcttttgcccctgtcaactctgcaaatggagatgggttttaacctgttcagagatctctagggggtcagggacataagagaaatatacagtgtatcacacaaacaatttcaaattaatgttatgttactcttattctaaagagttctttggaccctgcaacaatgtgattttctcagctttgctttctctgtagctcccagccacctgttagattgatggttaatattttcgcatcctgactcatttctcctcaattaaaaaaaaattcacaatctttctgctctattatgcagagcaatttgttttcttgagtctttatcttagctcactgatcatgtctttaaatttttgatagtttggcattaatcttgagttttaaaatattgcattaagtattatttatcttggttattgagttttttggtgccctttaaaattttgcacctgagttgagtgcttcactgtagtctgggccctttactccctatacctgcctcaccttgtccccatcacactggtcagaggcagcccctgctaagaggttcttatgtattattcaaataaagttccatgcatttagatatatctgtaagtctgagttagacatcagtttcacacaaacatatacttattattccctgttctgcaactggctttttgcctcactcaatgtgttaaaaatcttcccaaaaggttgatatattatagctcagcattatgcttttcttttttttttggacggagtttttgctgtattgctcaggttggagtgcaagggcacgatcttggctcactgtaacctctgcctctgcctcctaggtcactcctaggtctgcctcaatcgctccttgaagtgattctcctgcctcagtctcccaagtagctgggattacagatgccaaccaccacacctggcaaatttttgtatttttttttagtagagacgaggtttcaccctgttggccaggctagtctcgaactcctgacctcaggtgatccatccgcctcagcctcccaaagtcctaggattacaggcatgagccaccgtgcttggtctgacatcatgctttttaacacagctcagaattttcacttttgtgtattttcctaataatttgtaatgacgttgtattttttctatacaagaaaacaaaagaatatttaaaatagtagtgaaaagaatagttacatttattgagagactatttaaagtgccagtactatttaagttgttatgcattatcttattaatcctgttggtaacgctgtgggataggagtcattattgtaccttacagatgaggaaactgagatttagatgaattaagtaacttggctcaatatattacatccagaggtggtagagccaggatttgaatgcggatttatcttccttcaaagaccgtgcttttaaccacactctttaatatatcaaagtatttaccaaggcctattctttaaaagacccagtagaagccccctgagttacattcagtgatgagaataacgagggcctcatgtgaactgttaaacaacaataaacttaacagaggacagagttatgagaaatgccatgtggggctgactggttaagtatcccaggagtggatcggatacatttgcttatttttccagagttcgaagggagctgtgtggattgaacagttagtgccagagactacaaggtgcgtttaagatgctcccaggacaagcttcctttgctccatcttagaacagtaaaagttagctcagtctttcttattcggtgctcctctccttacgtgagattacttacattcctcattctttttcctggcccagtactagattctgatattggtttctggctgtaacagtcataatactttgatttgcaaataagagaaaagtcaatttacattagcttaaatatcgaaggaagtttcttggcttatgtaactgattagttcagaggtagcatgcttcaggcatggtttgatcagagttctggctatgtttcattgtgagttatctgtgctggtattgtaatgtgtcaactggctaggctggactgacattttcagaatttccttttctgcatgcttcttattagggtagaccacaaaaggtattttcaggtaagataagagggtggaaatgaagcagcagtcatttttgtttttgacactcagaaggtcggagcaggcatatggagtggggaaagtatgccagttaacctatttcataatcacatgctctatcgctgttcctgaagctatgccaaggtagctgggtttggaagtgtttccagccttggtttcatgttccagaattgcaaaacttcaagacaagtgttaacttgggccatgaacccaggctttctcttctttctggtgaatcttcttttaaaatcttgttgtccttacatttttttttctattaggcagaccatctcggtcaactcaaagttgttctagtgttgaatctacttcctaggttcagttcaggatttcaatccccttcctacaaggtttttagctccttggtagattgattcatttctcccttacaaagatgtttctgcactcctgggagctttgggaaagtacattttgtcgggtgaggagaatcctctttattcagggttaagtgtctccttggacttaacttgcataactacaagggacacccaagtaactcccaagaagtgagaaagcagagagctgcagagtgctttgctggtctactttggcagagaagagtcctcagctgctttcccgagagaatttaatttaatttctaccttaccaagcaaccccttgtatctgaattgactgtgtctttatgggatgatctctcattgcacgccctgttgatgcccacgaggttgtccctgggatcttggacacagcctagagtccctttcacatacatgtgaataagtagagtgacattcattcaataagtataagttatgctagggaagccatagggaagaggtgagcttggaagaatgggtaggattttggaagaggagtaataaggaccttgaaaaggaggaatgacatatataaaggcataaaggtgagagcagagaaagttccagttcttggggaggtgatgaatctggaaggagaggcctcagccttggccccaccactgtttgtggggccttagtagaggatactcttgtgtgctgtccagtgacaaataagaaacaagcctggatttttttttgttttttttcctgagacagagtcttgctctgtttcccaggctggagtgcagaggcacgatcttggctcactgcaacctccacctccctggttcaagcaattcccctgcctcagcctcccaagtagctgggattacaggcgcacggcaccacgcccagctaatttttttggtatttttagtagagacagggtttcatcatgttggccagactggtcttgaactcctgacctcgggcaatccacccgccttggcctttcaaagtgctgggattacaggcatgagccactgcacctggaccaagcctggatttttaagtaaggagagactttgttcagctaataatgtatgagtcaaagagcgtgaatttggagagcctttggccttgtcataggtaaacaaggagagggcacctgtgagtcttacctaagacatgtggggcagggtgcaccattgcaataatctattttctgggacaccaaagggtgggagattttttaacttccacattttccaagatcacagggcttggataaagttcaatattgtcactggattctgatggatcccttttgccgactctgtgtgcccatcccccagcttttgtgggctttgctgctgactgctcactcctgtgaccctcttcagagggttgcccttgggtgcagaagcccataggggtggggataggttcctccatcacagcctgaagtgcctgggactttgttcccaccattgtcatgactggtgtgggagtacaaaggcctagctcctgtgtccaaagctggacacagtctaaggtgcaactcactccagaactccatggaggatgaggctggggctgaaacttctccgaaattgcacctttgttcagcttctttcctttttctatgttgcttccttcattccctgactggtttcttcttagagcacttctttgacaaaccttcctacgctcaaatcttcagctcaggctttgcttctgggagaactcaacccaagacagcttcaggtttcccattggtagaatggaggccttgggatagaccactggttttagagctttgctttgactacagatccctttctatacatgaagatctatgaagaagtccagaatatcaaacaggttagaatggaactgctgaagttgatgtggggcagtgtccctgcatcccctcctcactattcccaccccccttctcaactttggtagcagtcctgctctaccttgcagatgctacacccccatcccaccttcttggggctccatgggcacagtgcaccagctctggactggatggtaatgtcctctagctctagctccatgatatccttggcatcaagtgacagcaattgttgctgcagacttcaggtcaggagtggccttgcatgctcctgagcccaaggtgctcctgatggtactgccagtgtcctcactggggcattttatcctgcatatcctcctgaaaggcaattttatcctgtatatcctgcttctggccaatccagtagccccacagtcttctctgagaccttgagtttgcaatgaggttcccagagactggaacctcacagagttcctggttattgctttgaatttgcacctgtggatttaactcctggtgatccaaaggcaatcaactttggggtggaacttcatgagttggcttcctaggagagaattggcagtggcagctagaggaagtgtgtgagaggctctgttcagcagggtgagcatatgccttgctcattcgaggcactgacagtggcagaaaccaaaggaaaggagcagaggcagagtggcttggggcattacaatgatccgtgcagttagatgtgctcggtgttgatgctagacgtgctcctcccattgatgatagtggcaacaacagtactgatccctttaacattattgaggtctattatgtgccaggtattgtgctaaaaacacctagtctttatggaagtcttgtgatgtaggctctattcttactcccattgtacagatgaagaagatgaggcataacaatttgtgcaagcccacacagttaatgtgccggagtcaggctttgaactccgacagtctgactccagaccacctcttcctcccagtatccatgctctggtgcctcctgtggcacactcagaagatggcctgcatgtgcatgtgctcatttctgtgtgtgtgcatgcatgcatgtttatgcaggactgggaatgcaggggagttagagtccagttaggaaggagagaggaaatatgatctctttgttgcatgtgggcaccgtaactccagccaggcaaagtgctggtctgttgtagctcatttttatgtttttatttagaagcttcaataccagagctgatggcagaaaatgtgcagtaaaatgcggggaggccgctgggtaatggcccctgtaaagtgttaattgcctattgagactgcagactttgtccatgctccaggatctgaactattgacaggttctaatttatttcgggcccacaaagcgggctcctcctctaaacaggcttccaatcagtcacgcttccctgggcctgccaagaagctccagtcgataagtatgtttgctgccttaaccctttgaagctggtcgtgtggtctgattctggcttgccttaaggaaacttccatgcacaatggtcttggatgaaaatccatgagaatcaagtgctgactccgtgctgggctcccagctgggtgttttacatgcattgtctctgatccttaccgcttagagaagcaggtagtatctcttcaaggacatcctaacctcagagaagttgaattaattgtttaagtgaccactatgattatacttcagactgttacgggctaaactgtgttccctcaaattcatgctttgaagctctagctctcagtaccttggaatgtgaccgtatttgaatatagggccattaaagaggtgattcagctacaacgaggtcttagggtgggccctgatctaatcttactggtgttctttcaagaagaggaaatttggacacagataaatacagaggggtgacccactggaagacacagggagaaggcagccatctacagactaaggggagaggcctcagaagaaaccaatcctgctgacaccttaatctcaaactgcaagcctccagaattataaggaaatgaattcctgttgcttaagccacccagtctgaggtattttgttatggtagcccgagcaggtgactacacacacccaggacttggtgtggccttgaatttatgcacatgaccactgtaagtatgaaaactctgttctctggcttatggctccagttagaataagaagcagaaagtgggcaatattacctctttgcagtaaatttgttcttaggttgggtcctcaaagggcccatgcctatccattagaaagaaaaagaaagctagatttgggattctaagtgcaaaaagaagtcattgactgtttctaagcagagtcagtaacacaatcagaatttctttctttttttggaaaaaatagtctcctctggctactgtgcatagagaatggatggtagaacacaaaagtgaagcaaggagaccccagaggaggctgttgcactgcaggcaagagatgaaagtgacttgatggagagtggtggcaacagagaaggaaagaggtgaatagatttgaaatagatttttgagatggaattgacagaacttgctgatggattgggggtggaggtgagagggagggagttgacaagtgatgatgctcttgtttctggcttgagcaacctcgtctttacaggagctatttatgaggagggaagacatgaagaggaatcgattgggtggcaggtgttcactttctttaagtgggctgtccactggaacataagctctgagagggcaaatttattgattgaaggttgtatgaatctatttattcctgtccccacatttcatgcacacatatggtttttatatgaaccagaaataatgtagtttcttttttctacatcagaagcagactatattttatgtcaagggtgacatctaattttgctagtctcactctgttgcccagcctggagtgcagtggtatgatgtggctcactgcctgccgcctgaaactcctgggctcacgagaacctcccacctcagcctcccaagtagctggaactacaggtgtgaactaccatacctggttaattaaaaaaaatttgtagagatgggtgtcactatgttgcccaggctgttcttgaactccttgcctcaaatgattctcccttcttggcctcccaaagctcttggattacaagtgtgtgccactgtgcccagccatcacttagcataatgtttcaaaggttcatcaacgtttatcatccactgatacatgttgtagcatgcataggtacttcattcctttttatggttgaataatatttcattgtatgaacagaccatattttgtttacccattcaccagtttttgaacatttgtgttgtttttaccttttggctattgtaaatagtgctgttatgaacatttgtgtaaaaatttttgtttggacacctgttttcaattctttgggggtatataactagcagtggaattattggatcatatggtaattctatattgaacttagtgaggaaccaatgtaaggcatattgatgataactgatatgttccattttggaaagaggaaatggaggcccaggatggtctcaactaccatctaaacatcctcaactctcagctctttaacttcggtccaaatcttctctgtggtctttagcccatgtatttaattcctggtggacatttctacctggatatctcatagtcacctcaaactcagagtgtctgaaaccaaacacaccaacttcttccgtttattcccataacagcttcatttcctgttttcatctcagtgaatgacaccaccgtccaatcagctagcagtgggacatcatcgttggcctgtcaagggatggtactatttactgtgtgaccgtgggcaagccatccatctctatactttagtttccttgtccagaaagttagaagataatcttactggggatgagtatgaggatcaagcgagatgactctctctctctcatctctacccccatcttagcaaagtgtctggcacacactgtgagctcaacactattaacatggaactgttttgggtaagatgtgttattatcctgtggagctggtgtttcacagaacagagttgagggaaatagtgaactgtagcaatcattttcaaatgtgttcttgcaactggcagcatcagcagtacctccgctctatggaatcagagtattgagggatagagcccaggaactggcacaattaaaaaatgccccaggtgattttgacactcagccaagtttggaagccactgaattcagctaattacattctactatcagtaaatacattagaaacattagtaatttcaatcaaacatgaatttcactgttttcctccccaaatctaataagagcatcaatctttgatctttcaaataggtctccgtttcttctcactattctgttgaacttgggcagccttttttatgtggtccccatcagagctgtcctttatcaagttgcattttgctctcaggactgacagcatctggacattaaattaaaaattacttagacatactattggtgataatgttgggcactttgtgactcacctcatactgtcgtccttaggaaaactgtggctagtccagaccaggcataggtcttcttgtggagggcatagatcagaaagcattagagatagaggaaggtgttagctagtgttctgtatacaaaggagcctgtaggacacagtgttaagcaaaatgatccagcttccttttcttcaggacttctcagagccttgaatatagtagtggacactgactatcctaaagtgcaaatgaactataactgcaagtagcccagtctggacaaggagggaggccttccaaaggacacagtttctaggtggttagttttggacatcctgatatatcttgtcaggggcagcagcaaagctttggggcagccttcctgaagatctgagctgaggaagggtcaacgtggagaagtgggtgtgaaggggggaaggttgttggacattgagatctatccattgatctattttgatcaatgtctgtcaatatccttatgtcctgactacctggttcaccctctggctctgaaaagaaccactttggtttctgatgttctggaggcccaccagaccctctaatgacctgagcactgggtctgtcttcctggcacccatcaccagtgtcacatatatgtcccagccacaccatccatcatgtcaaattgtatgtacaactgtcttctccattatgagctactgaaggcaggtcttgtgtctttttcttctgtcgcctcctagcatagcaccaggcacactagttgtgttgattagtgtttgtcagttccataaggccaccaggatgctctgttttgtaggaaaggaagagaggcagcaggaaagcaggcaaggcagcttatacactctcagggattggaaggaatcaggagagggctccaagcccctggggctgcacagcccatttctctgcagattgccaccactagagagcacagtgcacctaggaacagggtctgccgagtgtctggctctggcccagcccagctctgctcagccccccacccctcctggcaacactgcaatgggaagcaggatttggatgaggctcagccctgcctcagacactttgcaatcttaggcctaattaaaacaccacagatggtttgaaccccgcattaaaatttgatgaggaattgatcagccaagcaaacaggaaatttagctgtgagtgaaggtaatgtttgctcaaatgtgtaatgaggcccacggggaatatttgtggggacctccgtcatgtctggagtggctcctgctcttcaatttcattttccctatttgcctttcccctcaaaacatcccaagatgcttccagaggggaaaggcaacacagggaaagttttagtttcataagaatttcctttgaaaacccaaggaaatctaaaatcctcaactatgtactggaaaaatagcacaggaaagggccagacttgggtgggagtcctggctctgccatttggcagttggcatccttaggttgcaatatctaattttatgattagtcactgagtacctactatgtggcagccaggggttagatcctggggatagacggctgtgcagaactgtcttggttcctgcctccatgggtaaacagctgagtaagagaggctatgagtctcaattttcttatctgtaaagtgggaatatttgtatgttatcatagggggttgttggatgaattaaatgagaacgtgtatgcaaaacgcagagaacagggctggaatacatgtgtcaaatgaaggttcctccatgtccttcttccccataacctgcatctaaagtctatacaaggcttttcagctttccttctacttaatgtctctgaaagtgacctaatatgatattcactcacttatatgttcaccactggtgggtgtaactgaggccaaggacacagcaagtcacaagactaacctatttaccagattggaattggatcagaagttctcttagaaagagatgaaatagcaagcattcttgggtcatctgggatgagaggagtctgatttgagaacgttgctccgaggattagggagaaacatcagaagcttaacgtttcctttagacacatccgtgataccttaagtgggagaagagaggaatatggagagattttccttcctttcacacatccacgaagatactttaccctaatagtaatgatgtgtatgttgtgtgctcagctttcccttcctcttcatcatcccgactcccaacccaatgcccacccattgccattcctatccttatccccgattccatccccacacccatcctcatgcccacggttacccattcctattcttatccccactctcattcccacactcatcctaatgcccactgtcacctattcccattcctattcttatccccactcccattcccactcccatcctaatgcctactgtcatccattcctgttcctattcttatctcccattcccatggccatcccaatggctactgtcactcatttctgttcctattcttatccccacacccatcccaatgctacttatccatgaccatttctttactcacctctactcctccccatcaattttcttccctgttaccaacatcattaatattatcaccagaatctttatcacaaaatatccccgtcactggtttggtaggtgcaaccagatttgatttccctttcttctactcataggatcttacataagttgatcatgtttgttaaatttctaggataacccccttccttaattccaagatgcatgcttccctgtctcacatgttttaatgtctttgaattcagaaggtacctcacaaaaaaatgccaaaagacaatttctagccacaggtagaagaatgagctgtgacagtgttgttattgctttgacattgcaatagactgctgaagtttcaaagatgggagagcctgggtgaccaatttttatgtcctggagaaccaccactcagatatttacataaggtctaaggaaagcaatggctgatttccaagtgtccgagtttcattaatagggaatttcaaaacaagggaaaaaacaaaagcttgagtttaatcaaataggaaatgaggacaaaaccttggttttcttcaatatgtttcagatgatgatgttacttctaaagttcttaaaatacagagcttagaattaggaaaaacaacatggcaccctgatactaagggtaactgctctttgagcactgagtaattgagtaattttcaatgactttgctactatggattgaatatttttcacttataaaagtcagtgaaagtctgggaaagtatagatttatatacatttattttgtatcttgtcatctaatgagatataataaattcattagtttatcaaattcttgtattatgttttctaaatttacagtaataacatttgcaaatgatacctgttttgattctttattttcagtagttaaccacttatttctgcctcctactttataggccagagcttccatcagaatcagtgtattcagatttcctaatattatttaattaattttggtcattataacattgtgatttttctaggaaattacaggtttttttttaaatcaagaccattggtatatagctgtgcagtattttctgtattaattaaaaatttccctcatatttactttcatatccctttatccatttttaaatttatgtaacccaaatgttacagtctcatgaggtcagagtctcattaagaaaaaatcctgcattttgaaggttctgagtttccatctgactgggtccatgtatcagtcctccttatttcttgccgctaacatcatgcaggtgtaagttctattaattttataatcccacttcttaagggtaaccacaacaaacattttggagtagaaaacatcagtcctttttctatacatacacaatatgtgtaaatataatttcatttcttacacagtggggtcatattatatattgttctgtaacctgttttttaatgtatcccaaaatatgttctttattgacttcataatattccacaatatgggtgaaccatatgctatttactaatttctttgttgtttcctagtcaggttgatccatttgtttgccaccgtaagtcatattatgatgaacacatttgtgaataaatatttgttcacatttctaattatttccttaggataaaattgttaagtaggcatgaataatttttcagcatccttgatacagattgccaaattaccctttaggaatttgtactaatttatactcccacttgcaatcgatgagtgcctagattgctcaactgtcaccaacattgagtttctttaatctttgcaaatttaatagattacaaatgaaatcacattgctgtcttaattagcatttatttgattattagtaggatgaaccttttaaatctttgtaatttatggttcttctcctccttttttgagacagggtctggctgtgttgtccaggctggagtgcagtagctattcacaggtgtaatcatagcgtactgcagccttgaactcctgggcccaagtgatcctcccacctcagcttcccaagtagctgggattataggtgcatgccactgctcctggttatcattcctcttacatgaactttctctgtctgtccgtggatcatgtttccctaactcagcgtttgttttcttactgcttttaagagtgatctaacccgtaaccttaaggatattaactcttcatcatacatgttggaattttttttttctcagtatgttgttgaatttttaatttttatagttaggtttatcaatattttttgaaatttatttcttcgcttctattcttagtgaattctgtgattagatcaatattgatttcagttttctcccagaggctgagctgagtttttggtgggtttggcacagagctccttaccctaacctcaatagcagaacaggcctcctttattgggagagggaatcctctttgaatgagactgcagctttgggaaggaggaaaatggagcagctatgaaagatggtttgctgtccagctcataaagtcatctggctcagcctggtgatcttggggtggcatgcatcacattctcagccccgtctgtctgagcttctgtttccttctttcatgtaaatcattaatctaagatttagttcagtgcatatttgagatgaggctctaacaacatatacaatatacaacaatatatatcaacaacaatatgtattattaaatacatatatgtcatctccctgaagccctacaagagcctaatgagatagatggtgatataatttatagaataggaaactgaagttcaggggggccaggcattttactcaagaactctgcctttgacattgacccaaatactctgccttggttagtccactggatgcagttgcagtaaagagctgggaagctccaaatcccacctacttgattgtggaaaggtcagtctcttccatgcttctgctttccaaatggcttgggggatttctagagaagcttccatgtgttcataaatcagtcctgttgtcattctctccttttccagataaacctgggatgactacgccacaccctgacattacagcatcttgttttatctccctgagagtgctaccagcaatgccacctccaagtgtagctgtttcaggtgtggaccctaacactggattcgtgtacccagctctgatgctgtcatccctcttgtggagtgagtaaaaggactttcctttgttatgggatgctggatgctgtatgctgtggttagttgcactgggactttgtaatttgaaggctctgttgcagctgtgtgttcctagtggtttcaaggtgcatctcctttaactatccaggcaataatggttccaagaggtgacaaggacaaagaacacttcctccttctgatttatgctcatttgatgaatgtctcattgcaaaaccgtccaggctccaaaaatattttccagttcttattcttagattttaaaactttttcagtggtctccctcccttcctacttcctacctcccttccgctctccctacttccttatccctccccgcccccacacagcttcccaccccaaatgctcatattgcaaatatgcaaataacaattaagattccgggttataaaaacagaaagaaacttcactgcatttaggtgaaaggaaatctgttggcaggatgttcgggatctcagaattgttaggcatcatggaccaggctagctaagagctctgtagatatatgaatcgggactcccagcaattgttttatggaaagaaggatctggttggggcccctgtgctatgcagcaatgaatggactctagccatttctttccacctcttcctttttctccctagattagaagtccccatggagagtgtaagccttctaaccttcctccacaagcctgcccctactcctgactgtactgggctagaaggaggaggatcatttctctttggtgtcccaaagttgaagtggtcacctctaataaccctcccaccaaagatatgcacaatgaagagaggcagttttcttagaggaaactaaagagaagtaataaacactgggtagcagctgctgcttccacttgccttggagagtctctaaaccactgacctcttaaatctttgctgagaagtggaacaaaaccatggtggggatccttggtggaaaatcatctattgcccaaccaattgggctggaaggggaagtttaggtcaagtggaaggctggaattagcctcatccatctacatggaggcagactcccttcatcccttaggcattcaaggctgtgttggcctctttatttttgtgtctcttccttctcagcgtttgttctccagatcatgattcctccctgccccctggctttattccagttcaccctagtctatcatacatttaaaaaaatatccttgaacctcaaggaggattagagttctgtttttattttataggagggtagggtcttagttcacatccttctgagaggaggagttggatgcaagctcatttgtttatctggaggatgatcccagaaaatggagaagtagggaaagaagaacaggggaggagaaaagccaaacaagccaaacaagtggcatgctggtgagtgtaagattatagctgtgggccacttggggtcaattctgctggggacccactgaaatagtgtgtggtatacactgtaaagtcttcccactggaggggggaggctgggacatctatccactgattcctctaccccatcatttggagattgcttctggggacatttgtgcttgcagcaggtcaacacactcaaggagtgatagataaagcccttaggcagagaagaaagacgtaggaagaggcattagaggtgggaagtgccagtgtcctggaaatgtttccatctgccactgcaggtaacccaggtgggccaaggggatattaggcaggatgtcaagagcatctgctacagagcaggctcttcatctactatgcaaattagtggattcatctctgcaagaggctaagtactgttacaagaaattgatggaagaccccaacgtcttatcagttttccacatccaatgggctctgtctactctaccttgtccctttttattactttgtgtcaaaattattgtcagaaattaaggtcataaataggtagcttaaaaagtttacgttcacatctattcctgggatcacacatatttcgtgtacttctcactcagttctttaatttctaccagattaatacattgccataaaagcagcttccaagtgcagtaataatcacaataatcactgtaaaatgtaatagataattatattgatgaagaattatatttagccatatgccaatataagaatacttattgattcatgtctatcattgttatcttctctctagcctttaggctatagttacctgtcaggattagtagtgagaagtctttggatggatttggaaggtttgtctgagccctggcaatgggtagggtacagatgactaatgtgaatggtctctagttttgttctctctacaaatgagctatgggacctcaataggaactgcacaacttgctttggaaattgtctgacttgcactggtatttttggatgacagttttcccactgttgatatgcctttctctttaccagcctttgttgattagaaccatgcagcaagaaaactcatgcatcactggaatgctccagtagagagcattcagcattgtgggttggctaattggttgggcaatagttgattttccaccaagaatccctgccgtggttttgttccacttctcagcaaagatttaagaggtcagtagtttagagacttctccaaggcattgttactttgacaagatgtaccagggtaattgattagtttgcacttgatattgccataaataattacaacaaagctatccttatcaaaacaaatgaaccaagcagtatgtctgttttgctgaaccccatgttcaaagggattagaaagatttagaaattaaccaaatctgtctttgagacactgcccctgaatgagagacagagtattgattaacatcctggaggaaatgacattgtaaacagctctggtttaatgaaacatggtagggaagtagggtagcaagacagggctagaattctgaccctccacttacaaatatgcccttaggtaagatttttgcttggctttctgttaccccattgatgagataggataaaaatatgaatccttcaggagtatcataaacatgaagtgaaagaatgtatgagcaaacactttgtaaattcaataatggcatgtagatgttacatgctcttgctgttaaatacgatatatagcccacttctttctacccctttcctggtttctctctgaggcagagattctcagcctcagcactattgacatttggagctggataactctttgttgtagagagctgtcctgtgtattgtagaatgtttggcagcatccctggtctttacccactagattccagtaacagcctcctggtcatgaccactgaaaatatccctagatgttgtcatatgttcatgggggcaaaatagaccttgattgaggaccactgctctgagtgtagagaagttgatgaacatttcctggaaattctttggaccttgcctctttactaggggtggcatccctgtatgttaaaaatgctcacagtcattctttgcaaaaattaattccaggagccggggtggatatatcagctcagcctaagttccactgtggtaacaaacactgcccaaatctcagtggctatgtaaccctctcctaagaagagtcagcccaggtcacatagccaaatccaccctaagtgggatggaagacatagaatttttccctgcaaaagatagtgaatattttgaagaataatacaatctactaccaggagttagttggtagaacacaggtcctttgtagtctacagatattgccatttttctcacacattttcctggactgactttttccaggtaccagccagttacttcttccaggtactttaggccccagctaccagctggcaggggctcagtctccatgccttgggtctcttggacttctcttctgacctgaccaaagctccatgttggggtattaggcacatgtgcagctgatcatcaagggaccgctttgattctcctttgcttttgcacacatttatggctcatgtagaaacttctcagaaagagccttctaagggtttcaggcacagaggtggctaaatagatctgcaatctgtaaagatgttgcagcatgcttggttgaaaagtcaagcagtcagttagtcatttacttggagtgttaatataatgacagtcacttggttgagctgattttgtcacttaactgctggagactgtctactgcttaactaaccagcataaccttcctccctggtgacacagctggagtgtgtcagaaatcctatcacttcagtagtgggactatggaaatgaatcttatagtggggctgaaggtcacaatggatgacaacgaagggtttctaaacctggatgcataggctaaactggtctgttcgtgacatggtgttgcccagttattgaggcaaatgcaatcacattttaccatttataaaacactttcatatctacagtcttccctgaaagtgcttcttgctcttttatccacctggaaaactcctattcaccctttaagagccctcttagatgtagccttccctgatggcactctcctctccatcattatacagttgtttgctccatcctctgtgctgtcacaatagtatcctcctccttctggtctgtgaagttgccaggcaaaggagattgctctgctggtccttgtatcccaggaactcaccattgctcctggcgttggaaatacatgcaggaacatggctggtttactagacagtttacccaaatttttaccatgactctgtacgccattaaaaaaagagagatttagaaagatttactcacctgcctcaagtctcacagctgccaattaactctttgttgtagagagctgtctggtggttggtggaatttagcagtctcaggacacttggcttcccttttgttttccagtaaaatttgagtcttctgggcactgattttagattggtacaagagacagtgattggatgcagttttagctgttctaaagaactgagtgatataactttgtggcccagggcttactttattatgtcagaaagacgtgagtttgaatcccagcccctccacttactagctgtgtggctttaggtgagttacttaacctttctgtgtctcagtttcttcatttctaaaattggaatcacaataatgcctatctaatgagattatttttaaggattacatgaaatagcatatttaagtggttttagcatttttgccggttatgtagtacacactgaataattcctagtttttaatactgtttttatttctatttctcaaacagtatattctgttttatgttgatgtattggatccttccttctttcctttggtaaactttgttgcatgtcttctttgccatgtattgatgtcagaaagaatccttaaaatgacaatacccaattgcatgattaataccacttcttgagtgcttggttcatttgagcccaacatccattgatcaaaatcaataatcaatgacaggcattatttcatttaatcttcatcacaacgttattaggtagacctcatttcttcccattatatggaggagaatactgagactcagagtaattagctgagggtttaagggaagaatggattgaagctgggtgtgctcagacacctgcggagggagcagaggagtccagcagtgtgttgagccttggtcctgtcctggccctgtggtctgtaagaaggaagaaagccacctccatgggtgccagtagctgctttcttgacactttttttgctgctgaaggaaaagtaccagatactctccccagctgactctccagggtcagtggagattcttgagggtcagtggaccaaaacggacctccagggtcagggtcattattgagggtccgtggaccaaggtcaagaggccttgggagttgttctgcagggtgtggcatggttcctgcccaccagttcccttctgggaaaggagagggcaattctgaggaacaaagaagttcagaagccaccagagggagcagaatcctgttctgcctccttgatctaccagagaactgatcactaattaacaaagcccagcatcagattctcttcacgctgccaaagcacaagcaaaaacttaaaaattccctctgtcatccacatgggactgtccaatacataaataaggcagagactcgttttgagtgtctgcgatgtgcaccttcctgacccaattccatgaattctctcaataacgctaaaaggtgggaaatagtcatgtccccactgcacagattcaacagtatattcattcatgcatcaagcatgttttcagtgattctatgtgccagacatgtgctgggcactggaatacaaaggtgaacaagacagctggggcttggggcttagagaggtgaggtcacttgccaagtcacagagctaagtaagcagtggagctgggatgtgtccatcccctgcagagtctgagcgcccacctgttatgcagaagtagtagtctggctgagatccctgggctttcttcacctcagtttccacatgcagataccagcagtaagtcatatgtggtatgcttgccttcagcacacatttcctcagtggccacctgggcacagaccctacccagaaggagtttatgctctagcaaaagaggcgggcatgtacagagttggtcagccatgtgccaaggcagattgtgataaaatcaagagctgagaatagagtattaactctcactggggtacatgtctttagaggccaagtgacaagcctgaggcttctggtgaggtttgggcaggctgatgacctgaattcagcttttctagcgcgggtggaggtatttctgtttcttggttttgcaaatacgaaaagaccactgggtgtctataatttccacttgtttcaagagaggtcactgcatacctgattttaaaaatgccttctgagtttctgccagtgcgagtgaatgctcagctggtaaacagccccaatgctggatgagggcatagagtcccctgggtcctgctgtgcaggccatggtcaggattacaaacagaagcccttcattaccaggcatatcttagcttgtcctgtatagtcttctttctctggtgagtcacttaaactagcacttttcatacttcactgtgcataaatcacctgggatcttgttaaaatgcagattctgatccagtcagtttgggacggagcctgctaacaagctctcaagtgatatgatgccgattgttcatggaccacactttgcgttgcaaggatgtaggccagtatctccaaactggtttacatagaactttagtgttcagtaaggtgtttgttttgccatgttaaataagtttgggaaatattaggttaaacaaagttaaatgagcttttgcactgcaggacttctcagaacttttaacatgttactgtgcacctgtctctccaagacttggattgagtatacagtttcccagattttaccaggaaaacccccattcttgcccaagtccctcccaagagtagccatttagttgtgtgttttggaacacagctcagacatcactgctctggactttctcattctggaagctttttgctctccacgccaatgtattttcttccatgcttcatcttcctccagtctctgcatatgtttcctttcttagcctggagataattcattaaagcagctctcccactccctgcctccctcttcagatacacctttccacctcctaacaccgtgactaaaaaacaccatcaatatttcataaactcacagtgacaaatttattttaatgtggtccaccgagagccagagattgattggtccctcagaagcgtgacacgtttcaaagcaggatattcatggtgtgttttagtgcctacattagtcagagaggagcggagcccggatttatcatcgttatgactttcttggtatctattctcttctagccactggcagcaactctctgaatgctccctattgattggttttgtgtctttaaaatgtgctggctggggaggagaggggggacttgggtctctatgaaattgagcctagcttgctggagtttctgcatattgggagcttgtgtttgggtgaagccaactctaattctcttggttttcactcatgagggcattggaaaaaggggctaatctccttgatttctggagagtattagtgattggaaaatgggacaaatgtgtacggggactgttttgccagctgtcactttgcaagcctgccccactggctgagcaggtcatagtaagtccttgacatccgggtcctgaggcttgacagtctgatgaggttttattttgttgttgttgttgtttcccccctccccctacccccaacctttcaggacaggtacagagtagggtcaaaattgttcttaaatttagaaaatctcttcctctcacagattaaataataatgataatggcaagtgacctttattgagcacttacaatgtgcccagtacagtgggacatgcattacagacataatttcttttcataataatcctaggaggaagaaattattatttccattttacagatgagaaaactgagggttagagagttaagtggctggcccaaagccctgcagctggtatgtggtttagtgaaaactaaagcccaggtcgagccaactttacatgctagctcttaatccataggcctgactgcctaagtgaagcagcccagagaacctgctgttgcctaactgataagctataattaatatgttcttacttattcatccttactgattcagaaggtaaggtctttcttcagcaatactcttgggctaatttgagtttctatctgactttctaagttaaataagctattgctctttttctttttctttttatttatttatttatttttttgagacagagtctcactctgttgcccaggctggagtgaagtggcacgatcttggctcactgcaagctctgcctcccgggttcgcaccattctccctcctcagcctcccgagtagctgggactacaggaacctgccaccatgcctggctaattttgttttcgtatttttagtagagatggagtttcaccgtattagccagagtggtcttggtctcctgacccttgtgatcctcccgccttggcttcccaaagtgttgggattacaggcatgagccactgcgtccggctgctattgctcttttaaattaccccagtttctcattaattgagatctcctcaaattaatatgaactaatgagaccctatcatattgccacatcactaaaagttgcatttagtcatatgtggcatgcttgtcttcagcacacatttcctcagtgcccacctgggcacaagccctacccagacagagtttatgctctagcaaaagagacaggcatgtacacagctggccagccacacaccaaggcagattgggataagactgaggggcactgtgtaattggagagctaaggaaagagcagttaactctcactgggataaatctgggaatatcttattgtgaaatatcaattgtgtggcgcctggaaaagatgaaaaaagatttaaagaagcagagagggttctgaggatgctcctccagggaagtgtcataaacagagatgcagcggaagggggaaacatgttgtgtatgttagggacatatgactcagatgactagaaaatttagacaccctttgagttcatccttccttgtatggataaacatgataacacactttctcccctcatatggataaggatgcattaagcaaaatgactgtgaaacaaatcctagttccacttggcctccattaggaagtcaaagatatatatctgggagggagaaaaaaaatcctccagcagattgaactgaagcatattgagcagttgaggcagcaagcagttaatcctggtgactgtagacagcagccatctctgtgcagtggggtgcgtgggcctctgcttagcagtcaccttcccactgaatcattttgaaggggttttgccaactctagggtttcccctgaaatgaagaccatccccttgctctagacaacagaatttctttcatacttaggcaacttttgacttcttattttcgggatccagaatttagctgcttctttttgccaggacataacagaaacacattgagagagtcggctcactagggctctgaattcctacgattgtttttcattctttctgtttcggagaagggaatgaagattagggataccagctcctgtcttggagttactgtaaaatccagtcataaccatttctaggagagtttctcggtggtctgcagatgacctgcatcatacacaccaggggtatcatatgagtaaaaattcccagcttaagacctgggtgtggggcccagaaatctgtattaaacaaaaaccaaacaccaacaaactaatcagaggtcttaatggtcagagatgcaatgtgtggttgggtaggtttgccctgtataccactgagggctccatttacataatacataggcagcccctagatttgtgcagtgcaaaacctgtgcaacagctcatggcagctttgcattgcagaatcaccgtggtgagatattctggcattggcatgtatcaagtccaaatgttagcacttttttctgatttattctgcctcaccatctactgggcatgtcagagatccctggggcccagggtagagcagctacagaggccttatacaaacctcattctttaaaggaagaccccaccagagtgttcatctgtagtaaattgtcaggtagattggggaattttggaaagattcttcatcaccaaataaaatgtgtttgcttcttttttgttatttatttatttattgagacaaagtctctctctgttgcccaggctggagtgcagtggcgggatctcagctcactgcaacctccacctcctgggttcaagcgattcgtactgctggacttgatgcttgaattcagcagctcatggaggatttgcaccctattttctgtctgtgaagctgctaataggcccaggattcctcaagaccacgttcggaaatgctgccccatcatcccctgataaagttgacaaagctcagccagaagcaattctgatgcagaggagagtacacaggacgagaagaccagtgtttggatcatgacccatcagttactggctatgatatcttggatacattattaaaactctttggaccttggttttgccatccgtgaaatggggacaagcattctcacctcctgggcagatggagagaatgcagtgtgctaacaaatgaagagtgactatcacagtaaatagtatttccttcctttattcaagcatgtgagggactaaaatgtatcaggcatgtgctaaacatggggaaaataatggcaaatgaattcacagagctgctattgttagatcacagggttgattggaaagactgaaagtgaagaagtcaacacataaatatagtccagagagaaatatgtcccaggcagaaaattagggctgctttaaaatggattatcagggaaagcttctgggaggaggtagcatttgatctgagacctgaatgatgacagtatgtgaagaagacagacaggcaaagagcaggggatgagcatttcagatggagggcacagcttgtgtgaaggccctgaggcaagggctagtatgatgccctggagaaacggaaagactgctgctgtggctggaatacagaatgagagaagactagagaagactgacatggaacggagcatggggatcaggcaaggggtttagttggaagtagttcttagtgtagttggaagtaggttcagaggtaatgctacttttccttttcccttctgtggactcagctgcttgattcatgccttatatcaattaagaatgtttgtagcagccgggagtggtggctcatgcctgtaatcccagcactttgggaggctgaagtgagcagatcatgaggtcaggaaatcgagaccatcctagccaacatggtgaaaccctgtctctactaaaatacgaaaattagccgggcgtggttggttgcagtgagcagaaatcacgccactacactccagcctggcaacagagcaagactccgtctaaaaaaaaaaaaaaaagaaaaatttttttttgtagctacaagtaacaggaaatgtaacaaagttgtcttaaataagcaaggatgtgttcttctcacataacaatatgtctagaggtatgaagatgctggtcctggttcagcagctcaacaatgtcacatctctgggctggcctccctgtgattctcttggcgttgccctcatggtcacaaaatagctgtcatagcttcaatcatcacatccttacaccatggtcaggggcaggaagcaggagccagtgtgggagcagacagtttctcttcaagtgcctctttttcataaggtcagagaaaactttcctttagcagatctctttgagtcatattagagtggaatgatatcctggggtccaagcatctccacctgatgaagaatgggtggagttttactggcaagaaaaaagtgcagggctggtaatcacagtgatctccaaattccccatgttttcacctagctccctgagtgaaggctacagaattttaagttttgcctccaactaggaacagcagccctcagagcaaatttcagtcttcttggaagctcctataagacttcttatttttctctggcaccacacaggccacttgtccctcttgctctttagcaagttgaaggcacaggatttaattaaaagcaaaacttgacataagtgtttttaattgtaatagaaaaaagctgcctgttttataaaggtgacagtttgcaaacacaaatgtgaacatattcctacctcacttggcggcggccccgtcagagagtggcagagtggtacaaggagatggatctggtgtgaatgacttgttcctgcagtgaaggatgcaacctgaattcctcctgaggagtgccagcaacacctgtcatcaggtccacttagctaatgagatccaaggggtagcctctggtaccaccgtttctctccagccttcagacttgcctggaagaaaggtgcagttccctctcatattggagaactgggacatccatgacacactgcagaagccagactgtctttcactcaggcctgagttcagtggtgatgcaaatcgttcattctgtccccaggatgctttccaacattcatgtttttaaaggtcaatctgggccgggcaaggtggctcatgcctgtaatcccggcactttggaaggccgaggcgggcagatcacctgaggtcaggagttcaagaccagactggccaacatggtgaaaccctgtctctacaaaaatacaaaaattagccgggcatgatggcgggcgcctgtaatcccagctacttgggaggctgaggcaggagaatcgcttgaacctgggaggcagaggttgcaatgagacgagattgtgccactgcactctagcctgggcgacagagcgagactccatctcaaaaaaataaaataaaggccaatctgctggctggggagctgtatttgcattcttctcctggatgttgggtcagtgtagattcagctgtggtgtactcatggaggccactgcatcttctgggtagaagactgagtctctttcaatctcgttttgcagagagatgtctggagtgtagaaacctaggaaacattcagctgcagagaatagaaagtgactcagataagtccagacagaaagaggatttactgaagacatctgagtctctcgaaaaaaatcatatgcaggagccatacgtgggcttttcttgcatctctgctgtatctccctttctagagatctgattgctttgcaagcctcccaaattctcagccttgtggacttctttctcagttttctgtgttgattctagcctagcctccatctgaccttgctattcaactgctcgttcatttattaattcaatgattcattaatttatcaaataatcacagaattatgtgtataatcacaaatggagacacctcctgcaaaggaaaggattatggtgttctacagccaaatgcttcagtttttgtgtctcagttcccaccattctgggtggagaatatgattggcccagcctgcaacacctggtccaatcagcaatggccaaggggtgatgaggtcgcacagggccaggcctgtgaatggagcatattgtctaagcctgggtatggggtgggaggaaacgcttgaaatctcttttacaggaagagcttcagatgagatatccacagagttaccttggatggaatctgatccacttcaggcttagttctcagaaaagcatcactaattatacggacgaacaggctcaggggtttgcattctagatgtttggtttgattctgactggctgcaaatgaccagcctaactcactggatggagcattctgcgttccaagtgccaggtgtgggcaggtgtccagctgcagatgggcctctgctgacatccaggccacaggctgagtggctgtactgaagggaacaccaagcctttgattccataaggtccctccttcactgaaatgagatgatggcacaggtacctcaggatggaaggcagtaataagcactgaaacccagctgtacagctttcccaacatttcatgctaaagctttgagtataaactgagcagcatgacgagaacaggtgtgaaggaatctttcatctgctcattcaccaggctttgatggaggatggaccatggctgacccagtcccaggcatggagagtcttgaggagttcatgatgacagccttccccatcccacagtgtttccctccttgaaggagttaagtaatggtgtgaggcagccccagagtctaggcccacagcagtggagtcacgtgctccttgcattccaggactggctgcctgaggctgggacttgcaggaaggctgtatacagagagctcagggcaatcattcagggttctgagggtcatgggaggcctggccaggggtggggggtccatcgctagcagcccacgcctgactcttcactttactccacccacttctgttctctgcagccaaggagaggcggacttccttgttctgcctggttttccccacgtgctaccagctaataggctgcagctgtatttcagaagagttgccacaaggaaaacttagcctgtaagtcaagcactttagttctccaggcgtgaaaaacaacactctttatttctggccatgcctggctttgtgagctgtgtctaatggcctcataaggagatataccaccgcactgtcagagtggtcctgggatttctgttagcaggtgaccctctgtccacaggtatggaaagggctggagttggagtcttggcctgtgatatgtttgccttgaaataaatgtcttaaaaaatctgttcaacattaaacaaaacaaaaggaaaaacaggaaacaaaaacaaaaccaaaaatcattactggatttttgggagcatgaaaagaaactgcgtgaaaagaaacttcgtgaaaagaatttacacagtgcttggcccctattgagggctcaatcaatattagttgttattcctattgtaattacattaattttgctaaacatttcaggcacaatgtcactgttcttcccagcccatgtcagtctaaatctctattgctggcatttgccctggtctgttttgttgttgtctcatgtagtagcccaggaatcctctgggattggagacccccatctgtacccgcctccttgtccgtatttggggcttgcttccacaggcagaatctgggatctgtaccaccatagagaagctttgaatatcaccaaaggtaaagtcttgcctggctggtgctcagctgcctggttagcctcagctgaagttctaactcttctaggaagcatccccgaaaagtatcctcctttctgcttcaatccacttttaaaaagcccctgtgtatggaatattgtatttgccaaagtgggcagcaataatatttcccattccatatgcttttttacaatgtgactttgtcactttttccagtgagtggtagtgtcatctcttcttgagtcttagtgaatctttggctaacagactagtgtagattgatgctgtgtggcttcggaggctgtgccattgaaatgccacgcagcttccaccttgctctcttgggatgcttactctgggaaccagccaccatactgagagtgagcccaaattaactcatcttgagagaccacatggagaagtaacgtgcactgttccagctgactgtccagctggggtccaaactgacagtcagcatcaactgccaatcatgtgaatgcagtacttccataccagggtcagcaaacatttttgtaaatggctggatagcaaatatttttggctttgcaggccgtacagtttctcttgcaactatttgactctgctgtcatagggcaaaaatagctatagacaatatataaacagatgggcatggctggattcggctcacaaactgtagtttgcatcccatgctctaaatgactccaaacccagccattgagtcactgtcatcctcccagccttccctgttgagcttctgcctgaatttctcatggacagatgccatgagttgctttctgctgtgacgttttgaggtggtttgaatgtagcaatagcacctggatccctccatatctctgttttatgattatcagttttatgattcctatgcctatccttctagttctgagcttcccaaaggtaggtactggctcttcctcctctgcctcctcttcagcagatctagtactagagtggcaggtgtcatgtcatgcactttacatggattgccatctttagtcttcccaactattattacatctctattttacaaataaacacagtgaatctctgggaggtcagtgaattgccccaagtgactcagaaacacacactcctcaattccagggcccaggattttatccacgataccatctagcctcaatgttcatggcataaaataaaggtgtgggagcctgagaaacacccacccactcgattgaaaacaaaatctgagtccagaggccacacatgttcaatcccagctccactctccatgccttgcagagttcctgggcacaggggattggtatagtttggatgtttgtcccctccaaatttcatgttgagatgtaatcctcagtgtaagaggtgaggtctggtggggggtgtttgggtcatgcaggcagatccctcatggcttagtgctgttcctgcaaactgatctggttgtttaaagtgtgtggcacatccccttgatctctgttgcccctgttttcaccaagtgagtcacctgcccctcttctgtcttctgtcataagtaaaagctccctgaggcctcaccagaagccaagtaaatgctggtgccatgcttcctgtgcagcctgcagaaccgtgagccaattaaaccacttttcttcataaattactctgtatcaagtgtcagatttttctttacagcaatgcaagaatgacaacacagggttgtacagtaaattttggttgggtgagcaaataagtgagtgactagtgcacatcacattaggttccccatttggttaatgtcagggtcaggtggactaatgttggagcacattcccgggtagaccatttacttcagtgaataagccttgtgcagatatggttggcagcctgtctgtatcccctctgcctactccagcaggtgcctgcagacagttccataaatgccagtggctgtttccctctgcctcagtgcatgcatagcccaagggagtggctcagcttgcaagtagaactggtcagaagggtgggataacaatcccaggatcagccatcaaccaatgagggatgggagttggtgggtaagtacccccgcttttcacccttccaaagcacaactctgaggtgtgctcacaggagtctcacagaggagccctttgggatggaggtgcattgctctttaacctcttaacaagttacctttcttctgttctcatctcaatttccaaaccctcacactactttctgaaagcacctcccaaagaaataacttgtagccaaatcttagtcttcagatttgtttaaaagcaaacctaaagggtttccctaagctagaacagatgtgtattgtacatggtgtaaaacctggtgcacattctagtacacatgtgtacacgacacatctgcatcaaagtctgagttaggccgggcgcggtggctcacgcctgtaatcccagcactttgggaggccaaggtgggtggatcacgaggtcaggagattgagaccatcctggcgaacactgtgaaaccctgtctctactaaaaatacaaaaaaattagctaggcatggtggtgggcgcctgtagtcccagctacttgggaggctgaggcaggagaatggcatgaatctggggggcagagcttgcagtgagcagagatagtgccactgcactccagcctgggcaacagagcgagactccatctcaaaaaaaaaaaaaaaaaaattctaagttagtgcaaagacataattattggttatattttcacggatgtggttttcttgcctttgagtatatatagtaactggaattaggctaagatttgtttattattctaatcaatagatacgaatgatttgtaatcaaatcaattgcatttaagtaattggtgctcagaaatacttgagggagattcagaatggtgctgtcttgggtggttttaatcatcttacccctgaatcttgctgtcaccataactttctatcaaacctcttcttcatgaatcgaagatgtgctggagtccaggcccagcctagctctgtcgcctccacactggccaaggtgtaggagggacacatttcagattatttggagttagtgggggcatctggactagcatatggggactccaagtgttgtcctgggaattctattggaaaattatttttggacactctttgtagcttaagctgtgtgtgcatccctccagagaattactgacaggtgtctgggggcactaccaatgtgggtcactgagcactaaaagtgtgtttattttggaccactgggagatttactttgagctgcatattcactggagggctggcttttggttactacttttctaggacgtcccccccacttctgatgtgctgagcgctgagcaactgttaattcagatcttctggggatggtggggggttggcggaagagtttacttcacagcttcatatagagcatagacctttggggtcttggtgagattgaggagggtcttctaataaactctcaagcttgagttgacttcgacgttgtcttctctttcccacattctatgaggttgtgaacattgaagctcaaattgtccagatttggcaaatactgtctggacaaaagtctcttcggcattccatatctctctggggttcagcctttacttctactttgtactgataactcctttcagctctttcatgattttaggaagatttacaaaatacatttgacccattttttaaaaagttactttcatcagggaggctaattccaatacctaatccaccatattacaggagacaagtttctgtcccaaggatttaacaaggagcctctctcagttgaacactgagcaggaaccatgagttggagaggattctggagtgtgaggacaggacttttaaaaaccttagctcaccattgcagctttggacattagtctgctggtggccccatttatatagatcaaccagtcagggaattaaatactcttgtcttatgaaccaatgggaactggaacaagtttgatctgtcttattacagagggctgaagtcctgatttggtaaaagtattctgtgattgggaacctagttatacccaactcatccatccatccatccatccacccacccacccacgcacccacccaataaatagggacatagtggaatcccattctgagagaaactcagagaggaaggtgaaaacagacagcacacatgttttaacaagccttccctgaaggatttaaggtattcatatgccccatttgcaaactccttcctgagccaagtgttggatccaacaccctgtcatcatgaacaaattcctgataaaatacatcttgtataaaaatgagaatgagagacaagtctttgtgagaagagtagatagatgtttaaattaagattaagattttttgactggtagttaccaccccagtctttagtctaattctggccactgctaattttataggattacaatgggaaaagacactttcttcccctcttgtgtttcatattgttttccactgaagaaagggaaatattagaaaaatgcctttcaggaacgaggtcctatattagagcaataaaagctaaaaccctagatctcaatggtgcaatgcaaaaaacgttcattttccatttattccaagtccagtgattgtgctcctgttctgtggctttcctgaaaagctttccttcacgtgtgactcagggactaaagatattgctattttgggatgctaccacattaactctgtcaaccaacttaaactaattgacatctataaaacaacaacagcagaaatcacactctttccgagtgcacatggagcatttaccaagataggccatattctgggccataaaacaaacctattagttttgataaatttgaaaggattcaagtcataaatagaattttctctgactacaattaaattagaaatcaataagaaaaaagatacctgaaaaatcctcaaatatttggaaatgaaataccacacttctaaattagccatgggtaaaagcaggaagtaaaacatttttaacaaaaaaaaatatggaatttatgtgataaagctaaagcaatacttagagggaaattgatagtgttacatgcctatgttgcaaaacaagaaaacgttcacatcaatgacttcagtttccaccttaaaaattagaaaagaaggatcaaatttaacccaaagtaaacagataaaagcgaataataaaattcagagtgaaggccaggcatggtgactcacgcctgtaatcccagcactttgggaggccgaggcaggaagataacctgaggtcaggagttcgagaccagcctggacaacatggtgaaaccccgtctctactaaaaatacaaaaattagccaggcatgtggcaggcatctgtaatcccagctactcgggagactgaggcaggagaattgcttgaacctgggaggtggaggttgcagggagccaaggtcgtgccattgcattccagcgtaggtgacagagtgagactctgtctcaaaaaaagaaaaaaattcagagtgaaatcaatgaaatagaaaaccaaaaaaagagaaaaatcaatgaaatctgaatagacctatgtctgttaaagaaattgaatttgcaattaaaaactttcccataaagaaaacttcaggcccatggtatcactggtaaattttatcaaacatttaaggaagacataataccaaacatacacaaactcttacagaacatgaaagagacttgactatttcccacaagatgtctgctctcatcacttctattcaacgttgtactgggtgttctggccggttaaactaagcaagaaggaataaaaggcatctggattgagaaggaggaagtaaaactatctttactcacagatgacaagattgtctctatagagaatcccatggagactacaaaactattagaactaacaagtgagtttagtaaggttgcaagagacaagattcatgtatgaaaatcaattatttctatatattagtaatgaataattgcatattggaattaaaaagcaataccatatactagagaataatatgataaaatgtttatggataaatctaataaaagacatgaacaatctataccctggaaactacgaaatatcactgagcaaaataaaagacaacctaaatagagtgctatgtcttgctcatgggtctgaatcagtattaagaagtcatttctctccaaaatggcatatgaatttaatataattccaagcaaatggacacactaattctaaaattcatttggaaatgctaagaacctggcatattcaaaataactgtgaaaagaagaaaaaagcttgaagtcttatgctacctgatttcaagatttgttgtaaagttacattaatcaaactgtaagttttgtcatcaaaatagacaaatagatgaaggtaacagaattagagagtccagaaatatataacagaatagaattccgcatatataggggcagctgattttcaataaagtgcaaaagacaattcaatgaggacagggtagccttttaaacaaatagtgcttgaagcatttggatatccatatgcaaaaatatctaaactttgatctgtaccttctaccatatataaaaatttaaaaaaatggatcatggatccaaatataaaacataaactataaactatgaatatatacatataagtataaatccaaatataaaacataaacctataaaacttctagaagagacaggagagaatctttgtgactttggattaggcaaagagttcttagataagacaacaaaagcataagtcaaagaagacatggaccaactgcctttcatcaacattaaaaacatttggtcttcaaaagatactgtcaagagagaacacaaagataagccacaggctgagaggaaagctttgtagaacaaatatccgctaaaggacttatatccagtatatttaaggagctcttaaaattttatattaagaatacaaagaccccccaaaaattgaacagaatatgtaaacagagactttatcaaaaaagataaatagatggtgaataggtacatgaaaagatgttcaacatcatgagccattagggaagtggaaattacagccataaagtgagatcactatacaccaattaaaatgttgaaaattaaaaagactgatcacaccaagtgttggtgaggatgtgatggaaaaaaaactcatatattgcagatgttaatgaaaatggtacaatcactttaaaaacagtttggcagtttcttaaagtgtcaagcatatatctactatataacttagctattccattcctagatatttgactaagaaaaaaggaaaacatatgtctacacaaagacttgtacacaaatgttcatagtagccttattcacagtagcctcaaattggaaatagtccaaatgtttgactacaggtgaatggataaattatgactctagtcataaaatgaaatactactcaacaataaaatgtaatgaattattgatacaggtaacatggataaatcttaaaataatcatactgggtgaaagaagtcagacaaaacagaatacctactgtataagttcatttatataaaactttagaaaatgcaaactaatctatagtgacaggaagcaaatcagtgattgtctaggatggggagggagagaaaggaggattataaaaggccataggaaaattgttgggatgatggatatgttcactatcttggttgtggtaatggtttcatgagtatacacataccaaattgcatactttaaatatgtgtggttgactgtatatgagttataccctaataaaggtgttaaaaataggctatctggctgcttggttgaaacagtttgtagatgacaaacatcaaagagaaggcctcttttggaagtccactgcaattagttcaggtgagagatgattggagcttgagctggggtgatagtagggaaggtggtgagtgaaggtgggattccagatatgttggagatgggctgtgagaggaaaaggtattgaggcttgggatgcagtttcctggcatggggatggctctgggagattaaataactttccctagtcatgctgcgaactagaggctattctgggattgaaatccagatctgccaagctccatggaagtcctgaagagcaagggctccctcccttctcactgtttgtgaaccctagggtgaggagagatggagtgtgggtacaggacctggctgagaaatatctggatgtggaaggttcctgcttgcctgaaatgcagggccctgtggtcctgatttaccccaagcttcctcagttcctgggggaaggtaagatgggccaaggtaggagagaagaaggacaaactggatgaaccaagtaggtgcctagaactcaaggcaaccttgacactgaagtgagggtcctaagagtgcagttccttaacaacttcaaaccctgctgaactcaccagaccctgagccttgagagtgtgactgagcacatggagggctgtgggtgtggtacataggagtggctgtattatgtagggtgaccaattcatcccagtgtgccagaactgcccaggttttggcactgaaagcttattccagggaaaatgtggacggttggtcatcctacctgtgtgcctgaatgaatgggcatggatgtgtgtgtgtgtgtgtgtgtgtgtgtgtgtggtgtgcatctgtgagttcttgggcctgtgcaagtgggtagagctaagtacatgaaggaggacgtgttaaggagtgtgtatccacgtgtaagggtgttactgggacttcgtagatgtctcaggcagatttatttatcccctctcctgactccttctgtgcttccagaaagaattagaggtggctctatgtgcaaaggcagtgttctgagtggtggagagtgtggactctggagtttgaatggacctggcttcacatcctgcctcaaccactactgcctctgtgaccttgagcaagcaacctaaccactttgtgggtcattttcctcagtgaacaatggacacaaggaccctttatcatggccacaaaagaaataatacatctagaaggatggccactcagtaatcgttcagttcattgtagtgattactgtcactgttcttgtgagtctggtgtgtgagactgagtgttgtcttatggagtgtgtgactgtgagtgtgtgcctgtgtgcatgtgcatgagtgtgcatgtgtgagtgcgtgcaattttgtgtgtgtatgtgtgcatacttgtgtgaatgtacgtgcatgtatggcagtacccatgcaggtgtatgtgagtgcatgcatgcacatgtgtgagtgtgtgtgtttctgctcatacagagccatccactctcagggtgagcaagctaccttgggcttggtcaggaagattgtgtggggtgggtagagaccagggtccctggagacgaggtgtctggaatctctgcgttctttttcatggtgccctcagctcccagcagggctctggccccagttctcagtgatgtgcgttggataggattgagttctgtattgtacaaactgccttattaaaatatatgttgtgcattcatgaatctttaatatgaggcacttagtgagtccataatctcctcaattgagctgtataaaggaggactgtgggggagatgaagactttctgcagaggctgcagtgaggaggggcagctgggggtggggacagaaggttctcacatatgagggtgggggacgaagggacagaaggttctagcatataaggggaggaggaggatgaggatgaaggagtgattcccccagaggaaggacagcagatcccacaaacagaggatggtggttcttgtggactgaaggaggcagtttccatacactgaggacagcttttctcccagatggaaggagaaaataggtggttcccatggactgagggaggatgaaggaagaaagtggttcccagagaccaagggaggtggtttctacagatggatggaggagagaggcacttctcatagacaaggcaggtggttctcacagcctgagggaagagggaggaaggaggtggttcccagaggcagaaggagtagggaggcagttttcacagagggaggagggagaaagaaaatggttccaagataccaagggaggtggttccttcagatgcaggaaggaagttctcacagatagaaggaagtggttcttacagacatagggaggcagttcccacaggatgtggggagtgggtggttaagatccaccaaggctgcagggtctgatctaggtattactcttgcaaagaggttgactatgtaaagggagaggacctatgtattttatggccatctggtcaggctggcaggaggaggtcagattgccctgggaggcttggtgcattatgggactagagtgacttttcttggagccaaaggcctgtccgtggcttcttttactcaagctgtacactgtctctgcttactggcctgcttgcatgctgcaggccctgctcagagaacctgccccactgccttgtctgcttagctgtagccattggaccaaggggcatctgctgatctgttgtcagacatctctcattgctgtgagatgcccatgcatagctcagaacttggcatacagactgttcattaaatatttgttggatgtgtgctggagtccccactgtacctagaagaaatggaagtgtggaaagattaagaaatttgcacaaagtcacttggctgttgtcagataaggagatcaatcacattctctcttaagaatataatttggagacataaaataggagttggtagacggcatttgagctaaaagttcatgcacagttggggctggagttggtgtcttgacaacctaatttatttgaattattgggtgacaggtgggggtgagtaggcaaaaaacgtacaatgaaagaaacccctctgaagaggagataaagctgactgcagagaaaagtggagatcaaaagacagagacagatgtagagaaagaggagaaaggtgcactcttccttccttcctgaatgggagcaggtttgaatgagttcaagaccctcccagggctgagcttctggcctgaatgccttgggcactcagtctttgctgaggcaggtacaggacagacattttctcactggattttcaccgtcgtcttgtactgtgtgtttcccattttatggttgggaaaactgaagctctgattggtgacaaatgcccaggggcacacaactgggaggacacagaggccagattgaaaactactcttttctagctcactgctctctagccacactggcctgggacaacccccagtcctgtctcggggtctttgcactttctgtccctctgcctgaaacactttatccttatgtccacgtaactggctctttctgaaccttgaggtctcagcttggtgttgcctgcttgagaaagttcccctggtcaccctgtctaaagcagccactacaagcttttattcagtaatagccctttggggttgctgttgctgttgtttattagttttggtctacacggcatttatcacaattggtaattattttattgattcaatgatttaacgattcacacacatcctgtaagctccatggagagaggcatggcctgtgtttttgctgtgagatgcccatgcatagctctgaacttgggcatacatattatgttcattaaaaatttgttggagtctccattttacctagaaggaacggaagtgtggaaggattaagaaatttgcccaaagtcactgagaaaacgaatagctggagcaggggttgaaccagcatctgatccagctccagagtccacactcttcttcgactgtcacactaggaaatttccatgtactcctcctttgtgaaaatcaccgtttctctgggctggaagatgtggcagaaaaggctgtctcccactggtctgggcagtgagcacactccacacccctgctgtttaccccctgtcctgagctgcagtggtcaggacgtcaaggttcaagactcagccctgtgctagcttgctgtgggaacttaggtgatcaattacctgtgcgtgtctcgtctcctgccagccatgtggctgaggccctgctgtgccctgtgctgaataaagacacagagagagagtcaggagtgtccaggagcagggtgggtgttgaagtgcctgctcagcttctgccatatttcattgtcatagctatcaaccttccttaatttcaaaggtgagtttgagcacctgggagtgaggggagagggatgccaagggtcaaaggcgaagcatggcagaagacaggtcactgctgccacaggcactcaatgtctctccctctgggagtgggctagggggatgtttatactcttgaaagcaagaaactaggcactggaggggctttaggaggtgaggagtggaaagagtctgctgccctggttcactgaggtggaagccaatagaagaggagggcacttggtgcctgggcatggaggggaactctgactatcctgtccctgctcccaagaccaagaagagcactggggccactcctgggcgctgactccctgcactctggctcagctatgtggaggaggcccctgggagaggggcctgggggggccaccaaagaggaggtggacgaaaagccatcctgctgtgtctccctgaagcagcacgagcacacgcaattataagacagtgggcagatgacagagttagttaatgtaacaagccctttaagcatttagccacattcgagtgtttaatcagctgtgtaaagtgcaatatctatctttcaattttatgccattaggggagacaagattttgattaggtacttaatctgtgcacggaaaaaacaggcccacagcaagcccacgatggggagggaaagggacattggacgggggattcgataaaggggaaagacagaaatttaacataaaagagaattagtgcagctcctttcaatttagtgcccaggctttatggcctaatcaattagaggcctggccaagcctgctgggaagctgctcggctgggctggaggctcggccatattaattcctttcattacgcgggggtcaggctgagggctttgggggggctcggcaaggagtgggtcacttctcgggcactggctctagaagccaggggaggaggtcaaatggtgtcatgctggacaggaagtgtcctgggggctcaaggagggctgggtacccagtagggtgggactgagagggttctgggggggtgcaggcccatgaggtggtgtaaagtggtgggtgagccctttagttgtggagtaggagaggcctgggtttgcagaccagctttgtgacctattggctgtgtgatcttggacaaattacttggcctctctgtgctgcagttttctgtagaactacaactgtggctactccaaagggttgccatgaagagaaaaagaaagtagcatgcaaagagcttacttagcatagtatgtggctgagtgagcactcactcaatgttagctattattgttatttgtttctaatactattatatgtgccactggaggtaacattttaacaggcaggagctttaactgccaccaccaccacttcctttacacaccagtcattgtgctagatgctctttctattactaacagtagttttacaggttggtgctattgcctgcagtttacaaatggggaaagtgaggttaaacaacttgtccaatgtcacacagtgttggaggccccagaattaacactttctctcatggtccttcctatcacagggtgctcactccttgctctcatggcagagttaaatgggactgaattccttaatggtagaggtcaccaggaaagggtagccttcctaaatgttcccaagggctctagatcttaacaagtcaccttccagttactgagtgaattgtagaaaagatgcctgaggctgggccagtgacctttacagaatcatggagaccttaaaccctgggaaacgaaagttggtatcctgaaagttttcttaagccatggcccatgaaagacagaaaaagtagggctgcttggggtggaatggaaatgaacagctgggtcgccttcaccacctcctctgtggctctagcatgtcctgagaggcacctgggcaggacctcagggtccagagagcccactgtgaaacccctagagctgtgagtgagttggatgcagagttcaggtggtaaagctctagagggactgttaaagaaaagccgggaaggaagtggagaccgttggaaccagcaaatgtgtcagttgaaggggcttttcttctttagcagatatgggaagggggtgagggagcatgctaagatttattgggcacctgttggctgacttctcgctcagtagctgtgagacttagggcaaatcattcactttctcttgccagtttcttcagttgtaacctggagtgatcatggttccttcctcacaggctggttgtgaggaggggataagctgatgtatgtcaagtgccgagaaccctatgtggcactgagctgagtagggatttgaataaatattaattattgctattaccggctgttacctcagcactttctaagtgacaggcccagtgctaggaactgtatatgtgataccatcccatgccattcctgtgccacctgtgtgggttgttgatatggtgtcagttacagcgatgaaaagtttaagttcagagagatgaagtgacctgtctgatatcacacagctggtgtgcaatggggaggagaccatctccttgaccgctagttgcttctaaaggccttcttccatgaagtgccacctcgacaggcatatggtatggccagagtgaatctaaactccagcaggacatttgggaaattatgtaatctgttcaacatgtatttgttgaacacctactatgtgccacataccataagccctgtgaaggtaggactcacatctgtcattgccactgccaccgaggaaccacttcacatgtttgtataatgaatgaatgggtgagtgaatggatgttatactgagccacatcctcagtatccttgaggagagggtggagagacgtgaatgacttgattttggtattaggtggagtgggaggcaacatgatagagtggacagaaaaatgagaatctctggattggaatcctggacttctctctctgcagttagatgagatgtgtaacctctctgagccactttcttgtgtttggcaggggcaggacaaaagtcctgctcttcttgccttttcccctggctgagatgatcaagggaaatttcttggctcaaggtctggcgcatgatagaggctcaatgaatgttacttgctatccatcctgcttttttttttttcttgaatgatcaataaatcagtgaacccatagttggtatcagccacgagggaatcttttattgaggtgtcattagggtttgtccttgatctctccctgttgacattttcagaaatatgtcaaataagcatgaaacaacagtccaattactgctcccagggcatcctgttcttcatagtatgatccttggttttaaatcctgtgctgcttttgtctattagactagatttccactagggtagggaattaatcttgctcattggagcagactagctgctcagaacactttttttttttttatttgagactttgagtcttgctctatcgcccaggttggagtgcagtggcgtgatctcagctcactgcaacgttcgcctcccgggttcaagcgattctcatgcctcagcctcccgagtagctgggattataggcacacaccaccacgcccagctaatttttatatttttagtagagatggggtttcaccatgttgtccaggctggtctcgaactcctgacctcgtgatccactcgccttggactcccaaagtgctgggattacaggtgtgagccactgcacctggcctcagaacatgtttttgccaaaggactaaataaatggatggatgagagacagagatggccttgcagtaccgttgttgatgggacatagatgggcaggatagtttattgtgcagtagcaccaaacataagaagctttcttgaggtgatagcactgggctgagttttacagaataaaattggacggacaaaactgtcagcctctgcacacggatcctgtaaaccagctgtataaacataagcgtgggtgagagcgaccacttaaccttgtccttcttgattccttagtcgtttggagcagaggttggcaatgttttctacaaatggccagacagtaaatattttaggctttgaggaccctgcagtctctgttgccgctattcaagtcttgttgtaaaagcagccttagacagtatctaagcaaaggagtgtagctgtgtgccagtaaaactttatttacaaaagcaggcagccagcagatttggcccgtgggtgggtggttgccaattcctgatttaaaatacagccccagggagtaatcttacagccatacagcttcacatccaccttaattaacattgactctgggcagctgtgctcccatttcacagaggagaacactgaggcggataggcaaagagtctgttgcagagctggactcagcagggctgttgctccagacatggcaaaaaatatcagctgccacggaacacattatacgtcacgcacttaacatgcatcatccacagagcatcctcattgacctggagaggtctatcctcttattctcctttttacggttgaataaacctgggctcaaggaggttaaatgactgacttatggtcccacagcaaatgatttagcatttatttaagaagatttattgagcatccactctcttccagatgcttttgtacagttggggctaagggaaacccctgacctcaacgtgcttacattgtacttgaggagagtggacaatgaatgaatgaaatgaatcaacaatatagaacgttagaagggaataagggcctgtcagtcaggacaggcatggcttaaagcaagagtcggcaaactctgacccgtgggtcaaatcctgcccactgcctgtttctgtaaatcaagttttagtggaacacagccatgcccatatgcttctgtgcctattttcatgctatgggagagttaagttgctgcagcaggaattgtgtggctctcaaagccagaaattttgtgacctctggtttcaaccagggtttatttcttgttgatgctttatgcccctctgggtgggcccaagagcacagcctattggtccctcagggaaccaggccagtggggcacccactaccttgaatatttgcaaggcaaagcaagattctggaaagagtctcatatgggcaattaggtgcctggcctagaagtgacatgtgccatttctgctcagaattttttggctttacccaacagaaagagttctaactttgccatgggtttagaaggtgaagagctagaaatatttggtgagttgccctgatgaccacatgtgctatgagaaataagtaaccagggtaagctgacaggaagtgccaggggcttttcaattttaagcaatgcctccagggagggcgtggatgagaagtcagctgggatttgagcccaggtctacccatcttgaaagagtgtcctctcaccctccatgctatgctactgtaccctccatagcccataaagaacggttgctgggaaggtcatttgctggccagatggggaagcacactccccttgtgaactcttgccaaaggcctcactgcccctgtccccagccgcctcactccagctgtgggatttctgactctcacaggtcacaaccccatagcgatcacaaccaggcactttgctctccagtcctgggagagatgggctgggggaggagggcgagaggccctctctgcgaggctgtgactccacgaggcactacattaacgttattaataaccctctcagcctttattgaaaagatgctctccgtgcctgaatttgccactatggcaacccatttattaaggctgtaagagctggagtcacttcagaccatatttattaccatgatttgctgagggaaggctctgatctgggactggggcaattgggggagagaacgtgtagttgcttagagggaaggtcttggctcaccttgccagtaggtcagcgagggatgcggtttcattctctcccaactagatcaggactcaaattgcaggtggggagcttgggggttgaacacagtggtgattccttctctttttttttttttttctttttgagacggagtctcgctctgtcccctaggctggagtgcaatggcacagtcttggctcactgcaaccttcacctcccaggttcaagcgattctcccacctcagcctcccaagtagctgggattacaggcacacaccatcatgcctggctaatttttgtatttttgtagagacggggtttcaccatgttggccaggctggtcttgaactcctgacctcaggtgacccgccctcctcagcctcccaaagtgctgggattacaatcgtgagccaccacacctggcctgattccttctcttagtgtgcatacaaggacagcaagactcaaaggagccaagtgagtccccaggggcacagagctgtggccaagtgagcagtagtgggggtcctacaaggcgggggctgatttttctacaaaaatataaactagatttctctctctttctctctctctctttctctctcctccctccttcttcttctcgtgatatataataaactgttttagcaccagaaaaaaaaactcacaacatccacagtgatggtaacaccgccaccagctaatgcaatcagtgctgggctaaaggatttctgttaattcccctctttgaattctcaccatagtcctctgtgggttttatcgttgacctcattttacagaggaggaccctgagttctggggagattaggtatcttgtctaaagtcatacagcaagtaagtgcagagctgggactcaaagccagttctgattccaaagcatgttctcgtatcctgcataccacatcatctccttttttgttgttgttgttgttcttgtccccttttcagattccagaggagtgacaggctcatgtgcatggacaccttctccaataaccgttcctttgtctctctcaggtcccttcctctagaatagtctcaatatgagcacttggtcaatggagtgggatttgcattagtttgctcaggctgttgtaaaaaagttgcacaaacagagtgactttaacaacagacatttattttctcacaattctggaggctacaagtctgagttaaaggtgttggcagggttggtttcttctaaggcctctcccattggtttgcggatggctgtctcttcactgtgtcttcacatggtcttccttctgtgtatgtctatgccctattttcctcttcttataagaaaaccgatcatattgaaccaggcccccccaccccagtgactttatttaagtttatatatattttcttttttgagacagggtctggctctgtcatccaggctggaatgcagtggcatgatctcagctccctgcaacctctggctcccaggctaaagccatcctcccacctcagtctcctgagtagctgccagcatgcccagctaattatttttgtatttttttgtagagatggggtttcaccatgttgcccaggccccaggctggtctcgaactcctgagcacaagccatctgcctgccttggtctctcaaagtgctgggatcacaggtgtgagccaccatgcccagcctcaattttaattacctgtgtaaaggccctatttcagaatacagtaacattctgcagtattgggcactggggacttcaacgtatgaattttgggggaatggaattcatcccatgcaggattcaagaccaacttcccggcatctgaagctctctggggtcagaagagaacatccatggagttctgcagtggagcactggaggcaactggctcctgtctacactgaaagctctcattccccaggcctcactggagcgcaggtcacattgattccatctcgaaatggtcctctcaaaagggcaggaactgtctataattcccaaagtcttctcttccattctaggccctgggcacacagttgccccacagctgttccttccttcacatacttttcgccgttgcccatttaagatgtgcttctgggtatatctgcaatcttcaggcctaggatgcctcctgtttctcttccctgggtttgtgctttttatttctgctctctttccatgactgactacatccttcctggcctccctccctctttcctttccttcttacctccctttctctctcccttagtcctttctttctaactctcttccttacccccaaaaccattctctatacacgtgtcccatgttagggactgtgctagatgctggggattcaatgaagagcctaaactaaaaatttaaagcaaagatagatgcaaaactggaacctctctaacataggccccattctcatgcaacttcagactaggaaggaaaagggtaacgaaagattactgcaagttaatgcatggaaaattgcacctgcgaaagtggcaaggaaaggcagttgtcatgagaacataaaatagaaagatttcttcttgccagggaggccagcgggtgaggctgagctgagccgagccttggaggaggcatgaggcttaactgggcaaggtgacagatggggcagaggtttcatgcacgaggcaaatgatttaggctgtgcaaggaaaaagctgagcgcgattgaagagacaaaagtaggacagtgtaattggaggaaagagagcaagaagcaatgtatgagatgaggttggcagaggccagatcatgagaagcattaatgatttgttgagaaatccattcatttagcctcagtggaatgtggagccactgatgggtattgagcagggagtgggactaggcaaagagaccaggttggtgagtacaaaagatcatccaggctgttgaaagaaacctgagtggaggtggggaggtctgagcatgtggctgggtggggtgggatatgttaacagatagatatctttcattctatgcacccattggactttttactttttccttagtagaagctgtcgcttgtaagaccagatagcaaagacactaaattattgtcttttttttttaagtttattttgagctaattttatactcatgtcatagttgcaaaagtaatacagaaaattcccattcttccagcttcccctgatagcatcttttataatcacagtataatgatcgaaaccaggaaactgacattggtacaatattattaagtaaactgtagacatgttttcaccagttgatatcactgcgtgtgtgtggtttttatttttatttttttgagacggacttttgttcttgtcacccaggctggagtgcagtggtgtgatcttagctccctgcaaactctgcctcccaggttcaagcaattctcttgcctcagcctcctgagtatctgggattacaggcacctaccaccatgcccagctaatttttgcatttttgtatttttttttttttgagacagagtttttttcttgttgcccaggctggagtgcaatggcacagtcttggctcactgggattacaggcacccgccaccatgcccagctaatttttgcatttttgtatttttttttttttttttttgaggcagagttttgttcttgttgcccaggctggagtgcaatggcatggtctcagctcactgcaacttccccctcccaggttcaagcaattctcctgcctcagcctctggagcagctgagattgcaggcatgtaccaccacgcccagctaatttttttgtatttttagtagagacggggtttcaccatgttagtcaggctggtctggaacttctgacctcaggtgagccacctgcctctgccgcccaaagtgctaggattaccggcaagacccaccacacccggctgtgtatgggttctgaattgtggacttttaaattttcaaggtgtgtggcagaaaacgaaacaaccttgccaagctagtgccctctatcccaaatacttaaagaacttctgggtttctaaatggatggaaatgagggagagagcatggcacttagacgtgatgatttagtcctaaaaaggacagaatcaagcaccctgcagtgtgcttctcttggatggctggggcagctctgtggtgaatttccatcctccactcttttccccggctctgtcatccactctactcccagcttttagatttgctgaaagcccacctctgcctgtgctctgcaggccacagcatctcccctcttccccctcccctctcccctttcctatgaggtgaggtatagacctcttgggacgtcctctggatctctttacctatgggccccagccaacctgatatcccccatcttcctggtaaattccttcctagtttaactgtgacttttctgtacctgaccttattctaccactggtgtctgtgttcatctgtatccttccatcgggaaaactcattttcttcaattctgcctttacaaattctactcacccttcaaggcctcagcataccccttcacccctgccaccttgtttctcatcttcacgtgacctctttcaggttttagctcaaatgttacctccttagagaagtcttcccaccccaactccactcccctctgtcctgactgattttgttgctagtactttcagtctctgaagttattctattggttgacttgtttcctgtattttctacaggaagttttgagtacgtcaagatccagtctgtcttggcctccactgtaaccctggtacttggaacaggggatggcacacaaagatactcagtccgtatgtactcagagactgattgacacataaattatagtgattgcgtttagttaaataataataataatgaaaataataataatagtagttttacggctggggtagccgcactttcctccgaactctacaacttgctgtcttggcttttgctgtggattgctctatatcaagggtcacagatgaatctggataggtctgcctttatgcagatgcagagtcccttgagagggttggtattcttcatctctggatctcctttagcccctggcccaggagttggcacttggaaagctgtcatggtaaatattctgaatgaacaaatatttgaatgaatgagaaagagcagctatcattgcttctattttgcaactagtaatagtccagtttagtgtgcagacccatgccagcagcagagctgggcagaggagccaggcatcatcctctctctccccacaccctctgcatgcacttggcctccctgtctcctgctctctaggctcttaggagtacaatatagtttgtacaataagtacaaacccataaagctccctccagtatatcttgcttaaccgctcttatcagaatagaggagaactgaaagggctttcgaaagagccatctgttagttttcataaagacattatgtgcttcccatcacagggtttttgctgtctctgtcatgtgtccgccctccctccgctgtctgagagagcaggagcgtggtgcctctccactttcctgtctgtgcatggctgctggaggtgggctgcagatgagtatttatctaaaagtgaagagatctgacttataagcaagcctgatattaaatgtataaataatgcatcctgtggcattatttataatgcaataacatccctataatgtaataaaagtatgcaggttcccagcacttttcttaaccccttaatgtcttggaagatgctgtgggtttaccagcttcctcatgcctcaggggctttgggccatatgccaagcctggccaggccctggctcctaaacagctgaagcgtcttcataaccacctgcaggataagctcagtcccagtatatggggtagtgatttccaaactttgttgtgagtcagaatggagatttcctaccttcaacctactgttttggaatctcatagcatggggaggggacatttgtgtgtttaaccagctccctggtaggttctaagccatgtacataaggactcttggtcagtcctgccttgtgacagaatagactaatgagcagctccagatcattgctatgggactcaaaatcaagtcaatcttgctaggactgcactggcctggtgcctcagtttcagctcctgctcatctgcccagaatgcacattcctcctgtcactcaacatcaactgtgtgtctgaacccagccacccgctggcaggctccctcaaggccaactggtgcctaaccggtcctctgagttttgcctgctctggtattttctcacttatcaggtggcagaaaactctgggttgacccaggaaaccagtgcttacttaggtgcctgtgtctgatgtcttgtaaattcccctggtttccagactggcctgggatcccagtgctacccagagatctacctttcttttggggtctgtttctcattctccaaagtggctgtcttgtggtatctagtgtccttggatttccaatatctcccttttacaaaaaaaaaagacaaccttatatactgggacaatgaaaaaacagaacccatcagtggcatggatactctgaactttctgttcctcaccgtggctgcccaccttcaagtatatctctgcctgtatccatgctgtctgtcatctttcccaccacaatggaagaggtttatggtctccaccattaggtgacattcctcacttgtgctctggaccccaaccctgcagcctccccaggtaactctctctatagacaatctcttctctttctcctgaatcttcaacatgtttccctactggttttccatcagcttctaaacatgatcagcttctctcacccaactatcatcatttggctcaaggcttcttctagctactatcctatcttctcccccatctcaaccatatttcataataatagtggtatgtatttgttgactcttgtcaatggatacagtgacaatatatagtgaatgtgctaactcgcctagtattaattattttttttcgagatagggtttcattatgttgcccaggctggagggcagtgggctattcccggcttcattgtagcataccacaaccttgaactcctggcctcaagcaatcctctcacctcagtctcttgagtagctgaaagtacattgtacttggcttaacttatttaatcttcacaataatcctatgaaaaatttatactagatgagttaacacctaattaaggtatagagagatttggtgacttgcccggggtacatactagtgtaaggtttgatcctaggcagtctgacttcaaagcaaatgtctacatttgcctgtgaatctttctcacctgttagtcctccacgatttgatttctactctcaggtcagcagagatctctgcattgttacatccagtggggacttttggggcctagttgcacctgatagcactgacctccttattcatttttgaccttcgcttcttttgttcttgggtccccacagtctccttgttttccttttacctctctggtcacttcttagtcacatttgcaggctcttctctcttggcccaagaccttacattttgggatgttccagggttctattcttttccttctttccactctgcacactgtccctgtcttaatttgtcaactacattctaagaacctcaagtttttgttctgataactaaaccagaggtccatttgtttgcttaaaatctcaaaacaaatatttccctaatttaatcaatatttggcctgatgtcggctcttcctcttcccttttctgtctcagtcaatgaccaccaagcattcatccaattgctctggctgaaatttgcatagcatttttaacttttctgtctatttttttgagacggagtctcaccttgtcacccaggctggagtgcatggtgcgatcttggctcattacaacctctgcctcccgggttcaagcaactgtcctgcctcagccacctgagtagctgggattacaggcgcacgccatcacacctggctatttttttttttgtgtgtctttagtagagatggggtttcaccatgttggccaggctggtcttgaactcctcaccttgtgatccacctgcctcggcctcccaaagcgctaggattacaggcatgaaccaccgcaccctgcccaacttttctgtctcttttacccactctatctaaacaatcaccaagttatatgaattctatctactaaatctcccctactctcaaccccgtccactttcgcactcctcctgatgccccctgggtctcaatttccatcatctccttcttgaattcttgctaccagtttctaattggtctcttgattccagtcttgtggtcctctatacattagttatgaactatttaaagtatacagaaaattacagataatggtaaaacagacactcattcatctaccacttagatttaacaaacattagtattttgccatatttggattaactaattgaaaaataaaatgttacaaatacagttaaagagccccattcttttcttacacatctttctatcccaaagataactactgacaagctggtgtatatcttttctatgttttaaaaattcatatgtaaatatatatctacaatttgcatgatttaaatatttaaaattcatataagttatactgcatgtataattctgaaaaaaattaatattatacctttgagatttatcgatgttgatacgtagagctctgattcattcatttgagctgctatgctaaactgtagttataatctatactttccttatcagtttccctatccctggttgcatccagcctttctctgttataataaacgcttgaagagaaatctgcactcccatgtttattgcagcattattcacaatagccaagatatggagccaacctaagtgtccatcaacagatgagtgaacaaagaaaaggtggtacatatccacaatggaatactattcagccataaaaaaagaatgaaattctgccattcctggaaatgtagatgaatgaaataagtcagacacagaaagataaataccacatgttctcactcatatgtaggagctaaaaatgttggactcatagaagcaaagagtagaattgtagttactggaggttgggaagggtagtggggagggaagaaaaaggaagttggttaatggatgcaaaaatatagctagataggaggaataagttctattgttccatagctctgtagggtgactatagttaacaataatttattgtatatttttaaatagctagaagagagggcttttaatgttctcaacacaaagaaatgacaagtgttggaggtgatgaatttgctaatcaccacatattgtatagtgtatccaaatatcactctgtatcccattaatatacacagttactgtgtgtcaattaaaaagaaggttaagaaacaagcaagcatgctatgccttggcaaagaaatgtcttagatgactcagaaagtaatctgagactcaaagatacacatggagaatttaaacaaagttgttccatgttgtgaaaaaagtgctgcaataaacatacttattcaaggatccttaaatatttatgtgtttctctccttttcagggttagatcttgtatagtctgttctcacattgctgtaaagaaatacctgagactgggtaatttataaagaaaagaggtttaattggctcatgattctgcaggctgtacgggaagcatggtgctggcagctgctcagcttctggaaagtcctcaagaaacttacaatcatggcagaaggcagaggggaagcaaggtgtctcacatggtgggagcacgagcaagagagagagggggaaggtgctacacacttttaaacaaccagatctcatggtaactcactatcaggagaacagcaccaaggggatggtgataaaccattcatgagaaactgtctcccaccagggcccacctccaatactggggactacaattccacatgagacttggtgggtcacgatctaaaccgtatcagatctaaaatgagaatagttgagcattatgctataagcatctgtcttagtctgttcaggctgctataacaaaatactacaaaaaggtggcttataaacagcagaagtttcttacagttctggcatctaggaagtccaagatcaaggaactggcagatttagggtgtggtgagggtccactttctcatagacagtcttctttccactccaactgcacatggtggaagtggtaaggggtctgtcttgggtttcttttataagagcactaatcccatttctgaggttccacctccatgacctaatcactttccaaagtctccacattctcttaccatcaccttgggggatgaggatttcaacatatgactttgggggaacataaatgttcagctcacagtgtatctttaccagattttgccattttttttacaacggttttcatcaatttatacttccatcaagagttatcagaattttcattttcttacattttcaccgcaactcacaaatacttaaatatgaagagtgagaagtggtacatcattgttttaatttgtgtttaattgtgtttcatacgagaaatagagcatcagagaaggaacaaaatttttgactttccaggttatgaggactactttgattgaattaaatgggtagggcagaagtctgctgagcaggaggggcacacaaagggagaacacagtaggaagggttgaggtgggaggagcctgcacttgtgatcaggacttagaatgtgtgacaaaaactagtgctgcacatatcacctgagctgagactgggaacctcttctgactcatcctcagatggaaataaccccagtgactgctccctgcatcccacagaaaagcctgcttctggtgccttctgtttctgagttgttttaccttgcagcctctaggtggcgcacctgagttctagctgctcaggcctgtggaaagcgcagggatgactaacagaagaactgggagttatccaagagccgaggtcctagggtgaagaggtgcaggggagctcaagccagtgtttagtaataattttaaaaccctaattgcaaggggtgaagcagattataacagttacagtgatgatatgaagagcagtataatacagattttaattaatttttcattcagcacatatttgttgaatgtctgttgtatgctagcaactgttgtaggtgctgggcatgcaattagcagtcaataaagcaagacccctgcttgcagtctagtgggggaggaagataggcaataaggaaacaaaatgcttggatgcaaaggacagagtaaggcaagtggaggaattagtgatatggtagacacactaggggatggtttcccagagcagagttttgccatatgaaataggagcccaccttgcaatccagccagtggagcaggaatagtaaagagaggactttagggattggggaaaaatgtgtgcccagacccagaagtctcaaccacaggaaggagggactcaggaaactgtctgggagtcactgaatgttgtcggttgtgaagtgcagggagatgaggccacagaggtgtttaggagccgggtcatggttggacaagctatggggttggagctttatccagtggtgatgggaaagcagagggcgattttaagtgagtggatttgccagtagcatcttgggggataaactggaagcggggagacttaagctagggagactagtgggaggcagtgtgtgcagctgtccaggaggtgtcagggaagaggtatggggcctgaatcagctcagtgttactggagatgaaggaaaggaggtaggtttgactgaatttggtgaccgactgaacatggcagtgggagggacagggaggagtcctcaatgccctggcccctggcctgagtgaccattcacattgcctgagtggctccctttgccctatgcatgtgtcttcctgaccccagagtcatttttattactttcaagtgtgtagagtaaccagaactgaactaataaagtgcagcagttctgctttaatgagcagaaaagagtaatttgtaattagcatatacattatttgtacataatgagtgcttccaaagtccttatggggttgtttgtcttcctaagtatttaaaaccccacctcctcccaaccatcttgtttatgctgtttatttgtactatctgttcttaaaaatgcacccacgtgcatatgtacacactgacacattcattcgcctgcagccatctgtacattgtctgcagccagagaggcacacataggaacacgcagctaccatttcactcatttgtaaatgtaaccccacacttgcatgcaccagcacagatacacaaacactcaggtctacacataaaaatgcacatgcatgtgtacacacatgtacatgtacctgttcccttgtatatacacatgcccaggaagtacacagaacatgtactttcataagaagccacaggtgcaaacttgcatttataactgtgcccatgcacatacatgtgtatacacacaggtcacaggcctacatgcacacatgttcaaacagatacataaatctgggaggaattggggcttcaattggtctctttctcctcaagtactgatgatgtaaagctttttatgattttggtcttgtccaaagatttgaggttttggagtcttcgtcttcttgttcaaagcatcttgttcttgtgtggatcagctactgttagctaatgttacctatctgttaccctgctggaaagctggatttatgaatgatccctaaaataaaggtcctatgtgtaccacagcaataggcctaaatgagtagctgagaggtgaacttttgccgccttgggaccaggcctctgctggggcaataagcagtaaataactgtagctagtaccattatttttgggcccttacacaaaaaactctgcatagtgataaggtagactgaaaacaagcagcttctgagtagtaattgtgtaccaggatttctcatctacattgccacatggacttactctatagcattttgaggtcagaataattatccttatattacagataagaaaactgaggctcaacgaaatgaaagcatttgctcacggctgcacaaacatgggtttgaacccaggagaatctcttgcattatttaatctcttctccttagctcaccaccctctaccctgctgggtcccccaaacacagggtctgctggagcagatatgagacaaggacagagctggtgatagtctttggtgcctctgaacttgcatgaggtgtttctgcatggttgaagagcaatgatgagatgctccattcacccaagggtcagaggtggtctttcctggggaaaacatgactcagcttttctgaccttgtggttcgcttttgacatgactccagagaaggtgctggtaaagccatcgtttctctgaggatttgagtagataccacacctcagctccaaaaattaggttcgcaacaatttacaataagatatataccctaggtgaacaagcaaaggaccaggactcctttatcgtgttagaaatgtcatagttcctaaaatgtctaagctgtatggttggtcacctgccattcattggccaagcattgtgcttagatgaacctgggcataggaaaagttgaaggagacatccaggccacttttggtttacattactggaaacattttaaagacaaaaaatcatgcagatgtttttatagctattattttattttagccttaaaacactcatgaggaaagtaatgttaataacaataatggtgacaacagctgacttttatcgaatagttactatcaaccaggtcccacaatactctcaatgtgctaagtgcttcacgtgcaatagtctattcaattctcacaacaacccaatgaagtttgagtcctacagtgggttattactgctccattttcctgttgaaaaataaagaatcagtgaggtaaagtgacaggggcagcatctgcggtagaatccaggtctcctgactcttcagactgatctcatgtcctagtaccatccagggtcagagactgcaagggcaggtggaataaggttagggtgctgggaacaatatgctggtgtgtactccagcctctgtggccctaaaactgtcacaagtgatggtttccaaccaagtcaattgggtgtctgactttcatcctgggaccaggaaagtggggcttcacgactgccttgatggtactggtttgttttacagtgtttgccagtttctgtggtgtaaatacttacactatgtctgatttcaagctagcaactgtttagcaattgggagagaaggatagagggagaagggaagagagagaggcatttgcttacatcatgtctgatttcaagctagcaaccgtttagtgattgggagagaaggatagagggagaagggaaaggagagaggcatatgtaacaactgcatatttaacagttggctttctggctcctccagccgactgcttgggcccaacaccctagcaattaaccttttgctactcctgggctccaaggaggccaggccgtgggaacagagcaccagaaggatatttcaaggcagtttctccattgcctcagcctggatgaggctgatagtgttttacttcttcctttgcctccctcagggagaaaacaaagagtggatcccagaaaggccagggcctctaatctctcagtacaagtctttgaaaggagaggaagggagctgggtctaccgcagagagctggcaaggctgggtctctggaggctggggccaggggctccgcgtgtggagtatggagcagagccggtgggctgggaggaaacgactggcggaaggcctcctggaccctctatcctgtcttcataactcccacacagattaatgagcctcaggatgcccttggttttggccagccatgcttggggcctccccaaaatagacaggacgcccagtgcctcttgctattgtcccagctattgtctttatgagcctcctgggttcagggatcacatcctaactcttcctgttcgtgcttaatcaccatccggatggatggacacttgcagacagactgggggcaatgcagactcagggaagccagtactgtgtgcgtgtggagagatctggccccaccgtgtccatggctgaaaagggagaaatggggccatggtggagcttttgcaaagactcagcgctcctttcttggctgaggctggctgagggggccaccaggctcagagctggtgccctggggtagggcagtgtatggggcagagtcagccactagggggcaggccccgacagcaggtgggccaggcaaaaccctgtcaatgctcaaaaggatggtgggaggactgacagccacaaaaactgacccgcttggggtcttggggccccctccagggtctggtcagctccagagagaaccaacacccaggggagtctgggaagcaaggacagcagtgatgggaagctatccgtagattccctgtatcatcctagtctggggtgatggaactgtgatgagccgcatctgcgtctggatggggatgggcacgtggcttccccctgctgtggaagatgcaaggagcaggaagaacagtgacagagaaggacaggcctggggatagggtcaggagctggcagctgcagccccagcacaaaagccagatgcaggaaccctggcttggggtatacaagcccctgaaggggcctttttggtttgtatcctcctgggcctgcctggccaggccagcttcctgttagcctagcaaagctgagatttgtcagctactccaaagcagtccctgcccttcctgctcttgactctgcagtattttgccttggttgattctggcagcttgtgagccctctgagcctgctgcctgccccggatgaagctgtctgaggttcagctgagctgtctgaaagccagagaagcttaggatttaccctgagggaaaaagactgggatgcacccactactgggaggcctgatagacccagtgacctatggcaaaccatttattctattcagccattctcccatccatccatcccctccatccatctagcccctcatccatccatccttccatcaactcacccacccagccacccacctacccagctactcatttatctaccctgccatgtatccctccatccttttccatccatctgcccatccttccccattcatccatttatcaatccatctattttccatccatccattaatctattctatcagtatatgtcattgaaacttcctctgtgccaggctctcttttgggtcctgagaatgcagcagttcacatgacagaaaaagtttctggatcataagagctaaatttgaatggcaatgtcccagtgacaagccaaatcactcactatgacataaggatggaaattgatggctcagctcttaatccatcgaggcagcaaactccctacacctcttgccctgatacatacagatatatttacaatatgtatgaaggcaccccaaaatatgcatacctgtgtatgctcacattgcatccccttggatagcaacatgtcttcaggataatttgtgtacacataccaccatacccgaatgtataactatctaaatacgtgcatgtgcatggacataaattcacatatgcacacatgtacgtataggcacacaaggcacttacacatatttgcacatatacatacatgtgcacatatacatacttgtatatgtgcaccaggaacacacaggtgcacacacacacacacacacctgtgcacagctactcaggcacattggcatatgcactttaacttcatacaaatatatacacttgggtacagtttggatctgtatgcatataagatacatgtgctcacatatgcacctatccatgcacacaggttgcatgtacatgagcctacacatgtgcatgtaaatactccctctgactttgacctttcaccaaaacccccgaaccctaccatttccccattctgtcctggggaattatccatatctctgacaagagaatgggttactaatgcagccacagagctgttttgacacttttgatgaataacattcaatactattaattggaacaattgcttttcatttaactaaatcatgggaattgctaaactaaattgaaacggaatgtgattttgcttcgcactgctttaatatgggcctctaaatgtcttctctctgaaggattagtaacttaatcacccaccagtgataactgcttcccaggctcagccgggaggcttcctgctcagcagcagcctggctggtgaggaactgggggcccaatggcaactactctgccccttgcttcctctccctgcattattcatcgtgggggaacacggttctctcccttctctgagtccagcaggaccctcagagacaatttccattttccctgggctctgcctgtctgcgtcctgtcgaggagctctcattccaggatcctggatgtgggcgtggattctgtctctgagcttctctgagccttgctggaacacttcgtcctgagaacactggctctggaatcctggggccacgtataccctgagggcagcccagtgcctggcttagcttccaggggcaagttgatgtgggccagaaatgttccctgcactgcctgggggagcagggaaggccccagccagctgggctgttgcagggtgaccaactgttctggtttgcctgggactgaggggtttccaggacatggaacttttcagggctaaaactggaaagtccctggcaaatcagaacagctgatcatcctaactgtggtgtcatctgtgcctccagctagaaatcatgtttaacatttattgagtgcttactgtgtgctaggtgcttgacatacattatttaaatgttgtgacaatgttatggggatatgttctattaacatattcattgtataagtgagaaaactaagactcagttattttttaatcttatctatgtcctcacaggtgtggacacaacaataacaacaaggataacaaggataataggagctaattttataagagcttgctctgtgataagcacttctgctaaaggctcaatgtgcatcctacagcaatcttgaagttaggtaccatttttgctgttccttcacagaagtgaaggttattgctagtgagtgctagactgtgattctagacctagcagcgtctcccaccagcctctactgtgttggcttgcctgttaggctacatggggcctcccaagtccttttcctctgggtggtctaaggagacccaggctacaggattctggagggtgaggtccttagcaaattgagttgctgagcttagtgtggcctcttctaggtacagcttctgtccttgggtgtgcaaaggagacatggccactccctgaatagggatttcagggacagccaccccacccctttccactgacacggttcctgacactgggtcctctgagtggatttggcatgtgattgtggggcctgtgagttcttataaagccaggttcttgcctgcttctgctgatctaggacttgtttggactgcagcaacttgtttgccctgcagcatggtaggttgccgtatctgcctctccatcctctcctcctccccagccccaaggttgtcaggaaaaattgctaaatttggctctgagttgtcactccaaaatatttacaggaagagaaaggagcctgctttaagggggtccttattggaccactcctaagggtcaggtactgtatcaggcatttcggtttatgttctcatttaatccaacaacatcccaacagttaggaattattattcccatttcacagttcagagggcaaaggtgctgaaggaggcccaagttcatgcacctggtcagtgctacaccacagtttaggaatcagactgtttattccactgactcaattctcttcctaggcagatactgccattctctaaagcgtagctacttccgacctccaagtttctctgtctctctggagagggctcagtgtgctcagtgtgatgatgaagcttgcaggctctgaagacaaatgaatatggcctgatgcctggtgcttcatgaggcattgggttgagatctgcttgtctgttggagtctttatgtgtaaaatagggattcacacagtcccgacttggtagccctgttgtgttggttgcacaaagaagagctcagcacagggcctggcacagggcaggggattaataagtggttgctgctattatcatgtttatgatttctggcagtttgaaaggagattctctggagttcagtgctgtagatgtcaagccttgcctcccctccacatctacgctgcctgcgcccttgagtttcctattaacttaataggcctggacgtaaaggagccagttgttcatgggatcccagagtcaatcaacaatccacccttcactgcttccatttggtaaaatcgatatgtgttgattgaacactgagtctgcgcagagccctgaggctgcgcctgaggaggattcaacctctcgctgtgccagggagtgtaactaagatagcgttctctacctgggatccctggaccagcaccatcggtatcatctgggaacatgttaaaaaaagcaaatgggcctaccctaaggcccattgaatcagacattctggggttgggccccaggaatgtgtgttttcgcaagttccccatatcactctgaggcacgctaaggtgggagaagcattgctccaagagaccaaaacgcagctgtcctctgacaaggaccagctaagcctgtgggagcacagagggaagagaggaggacccagctggggaacctctggggagtggggtgccctgacaaattctttcttcctgctcgggcttgggaaggggaggagccagggctgcagtgagtccgcctggcaccttcgaccgattagacaaaggtgccttttcttctgcgaggatgcagcgctgccggtgaggggtgcgtaggctgggttttcatctcatttacccttcacccacatatgcaaggcccaggcaaagtgtatgataggcctgggtgcatttgacaggggaagagccgaccatacctgtcctctgacggtggggggtggctcctggaatgctgagctagcaaccatggtgagtccccctactgtgtggacccttgccaggcctcaggcctcagcagtcacttacataaaacaggtggtgaaggccaaagcctggggagaaagaggataatcagagtcaagtcatgaagacagcatgccatgggctggaggagatgtcccaccctgagccaccacaggagaaaataaagcaaatgattgacagcccctaaatgtgcgggttcctctagagcactgtcctcctgccacagacaaatcagctggattttgatgcaaaagtcaaaccaaccaccgagtatggctgaggaggaagagaaggctgttgccctcagcctgccccagtcagtgccacacagttagccttttacttccttctcctttcctccctctctccctggggaccctctcagaccactctcccaaggccagctggcctcattcccatcctcccaacataggctaccttggacttcaccacctctagattttggcctgcaggagcaccgctctccactgagagcacttgctgtctcccttacacacctgttcttggtggccagtggctcctcccttctccttggcaggtgtcctaggttttgtcttctgttggtttcatggaacactgccttaattgttcctggggctttaatgggaccctgtcctcttctacattcttctctctcccagaaggtgacttcttgtaggtagggggtacttgagtctcctcctctgttccccttttgtcccccagactgggaactttttatagcaaagttaagtctctccctgtctctgaaccagttctccactccaacatttgctaccacaagttttggacaaagtagagggagagggagcccacccaagtccagctccaggggcccctagacctgctttgttggccctgtctatgtcccaggtaccacaattgtggcaggtcactctggagggactagctatcctacagccccagacaatggtctgggttctcgttccctatctcctacccctcaccccatatacaccccgtatacccacacagcatgggaggtcactaaaactcatcactctccctggaggaagcctgaagggcagctggactaagtgcctccatccaacacccttggaggttcacacttatttctgttgtctccataccaacagtgcatcaactctcatcttttctggcccaaagttggataaagccccagctcaagttctcttttgtagactggcaatagagttgagaaatgtaaagaagacggatactaaaagatgaagaagtagaacttccaggagaaggaagttcttaggcagttcgtggatggggctctagctaggtgtagtgaagttagaaatgtgtactttctaagtcagacaattctgagtgtcttgtatttactttcatgtttctcagtgatctctaacatttggtccatatctcacatccttgcccttctccagaaattttcttctttgatgtcgtaactattttctggctcccaaaatcaggtgaacctgggtaccatcttccctgggtcctatgacctctcttgctgtgagatgccactcttctgcctcttccccactctctgtctccatcttctcttctcttttattgacatgtcccaagggtgctcttctatgttctttgatctctcccatctgtcttgttcacctaagctgtccctttcgtctctgcacatagctcccaaattccaattcttgcttctaagaaggaccctttggaactgagagctctatggagctaccctccagcataatcagttgcctagagacattttcaaatgtagtcccggcgagtatctaaaatctgacctgcctccaactaaacccaatatcttccttctcactagcagtagcttcctgcctcactctttctgctaaaaagtttcacccagactcgaaaattaatgtgtttctttcttgtccctattttcttctaaaaatctgatcggtaagttccagaatttccccaccgtgtcctttcctctcctgtggactgaacccctccctggctcacacacttgccccactgagggcttcctcccattggcagcttctatgccattcatccaaaacatgctgcctgccaaacttatctttttattgcccagcaaggaccatgtccctctgctacttaacaatattctagagcattatgccaacttctccctgaatcctttcatttgggaggttcctatgagtatagagcttagactataaggccagtcagacctgggtaaaattctgactctgccattaagtgagcccataggagagtaaacacacagcccttaataaatatgatttccctgatttattcaagtacaagtaagtttacttttacttttcataattttatgtctcattcgtacttctcttttggtatccactacttttttgtatctagctattttagtatgtattttctttttaaaattaatttcttaagcagaacctacttagatattttaaaatgcaataaatattatgtagaaaattagaacatattaacacatacggcctcagtggccaaagctgtaatcagatgtcaattcatagctattcattcctttgctcttacctggacaggagacagctactgaccattaaaatctattgtctctttccttcattttaatagatgtgctgggtacatggttactcagctacactttattttttattttcccttgaagttagatgtgattgtgtgacttatttatttaccatagaatatgagcagaaatgctttgtgccatctcccatataccccctctcatatattcccctctgtgttttttccctttttggctgattgagatggcaaaaagtaggcttggaggccattcgttgaagatgacattgtcactatcagcctggggtcctgaaggacctcgtaggacagaatctcagccacttggaacctctgccctggacagttatgtgataattataaaatcagtcttgcttttaggctactgaaatgtggggggtctgtttgttacatctgttaatagttagcctacctactacttactccccatggtaggcagaactttggaaaggtcccattctaatatccagaacctgtgataaatacaaggaaatatcattctcatgattatgttatgttttatggcaagttgaccttaaaatagggagattatcctgggatatccaggtggagtcaatgaaatcgcatgcgcccttaaaggtagagaaacttctccagcagttggcataaggggaagccagaaagactcaaagtaggagaaggagtcaatgtgccattgtcggttttaagctggaggggcctgtgagcaggaatgtggagtcccctatgggcagagtggcccctgactggcagtcagcaagaaaccctggaatccagatccagaactgcaaggagctggatttttccaacaacgaagctgaagctggaatcaaattcttcccctgagcttgcgcgtcagagtttaccctggccggcactgtaatttctgtctgtgagacactgagcagagatcccagctgagcccacctggattttgacctatacaactgtgaaataatcaatggcattgttttaacccactaagcttgtggtaatttgctatgcaaaaatagaaaaccaacacagtcctttagaaggcaaggactcaaatcttattcttctctgctctctctgatgtctcagggtagcacctggcatgtaagaatttaggaagcttttgttaaatggacaaatgagttagtgtggtgggtgagtgagaatcctcaaggtatagatccaaggtctgtaaacctttttcatgaagggcaagatagatagtaaatatttaggctttgcagggctctgtcacaactaatcaactctgtcactgtagcacaaaagcagtcatgatgatatgtaaataaatatgcatgactgtgtgccatcgaaggtttatttaaaaacaggtggtaggtcagatatggcctgcatgcaggagtgtgctgaccccttttatacatcattggaagactttgggtactttcatccaaagatggggaagcttttgcctagaaccacaagacttaaataaatggcttgagggcagaaatagtttctactgtaagaaatacatcatcaggcctgagaggtggtttagattgttccagagcacatggaactttttggtttctagggagataaatcccattaaaaagtctcttttctttctttggctttcaagaattcttctattaacatacccttacctggttttcccttcttacaatgagatgggactggctctctggcctggcagaaggaccctagcctgcagcagtttgcagagtaagggatttactcagctggttttcagctgagcccccgccccatgcctgaagcctgagtgaatgtctccagccagcccctgggcagagatggtacattgcttatgggcctgcctgcccatccttcatgaatttttattaaacaaaactgtaagcagattgattttgtcctcttttattgcatttttatttaattccgttccatggtggaggctccatcatgttaccgcagagtaaatcactccagggcatcaggccaaaaccgtggagaagggcaggatctggcttcccaagagcacatttaccgcataagaacctttattagcagagagccattgatttcttttttttttttttcaggtcatagccccttcacatcctttaaataagaaagaatcacaaagttatagtggaagagagactctgtgtggccagggtcatggggtgctagcttgtgtccaggtctgacaacatctgtactacccgtaccctcaactcagctcctactatgtgctgggtggggtcatatgaaaagcttggagaaaagtagtttgggtggagcattggtggctgatacagatggaagggaacattaggtccaggaacaaagtactttaatatactttttaaaaaaaattacgggtggttatagtttagcctcagacctttatgtaaaaagtcaagactgtgacagctgtaatctaaatctccccctccttccatagctcctactttcacactccaggtaaaggactttgggattttatccttaggaactagagagctactgcctgttttagagcagggcagtaacaggatactattactatctttgttagaggggatcaatctggcagcagaatgtaaactgaatttgaggagagttcaggagtagggcagggttggaagctagaaatgggggcatcagttaataggatattgccatggtctagccacaaggcaacaagaacccaaagttgaagtaatgaagttgtagaaatagtaggggagagagattaaacaacaaacagttggaggcgactctgaggttttgtcaactgcaaaagggagtgaaaggggtgaagtggtttgagcaaagaaaaagcagagctgagtttggtacatgcttatttacaaagtaaaagaaatacttatatatgtatatacgttattgcaaatgtgatgcagataaattgcagaaaattaaaaaatggagaaaagcattataaagaaaataaaaatcatatttaatcccacaaccacagtttgccattgcaatagtacgtttggtatatttctttctagatagataaataaacagatggagcatggtactaagtagtcttcaaaaatatgattctcactcgctgcgtattaccatctggatacaccaaaattgatttcactgtgcatcaattgttggactttaacttgatttatagtttctccacactataaataatgccatggtgaacatcttgctgtatgcttctttgtctgcctctctgataaatttctaaagtaaaatgattgagttaaaggttataatcttttttaaagttcttaactcatgttgtcaaatgctcactcgatacttactgatacagtgtatgttcaggttgatttcacagcacattcatcaatcaacactagaattattttgatttttttaaacccttggcaatttcacagtataaaagggataatcactatttcttaaattatttgttttttattattactaatactttaataataattttgggtgtgcctattggccattttcaatttctcctcttttgaaaattgtatcattttttcatatttctgttggacaaaatctgttttttatgtaccagtttatgacaacttttaatagtggggctattacagttttgtgtattagacatgttgcagttttttgttttttttttttttttgccacattctcattacctttcaaagttttatatggtatttttgataagtagaagttttgaaattttatgtagtcattgctatccccttttggattttttttccttttctgttatactttgacagtccctctcaaaacaagattcagtaaacatttacctatgatttcttttaattctttgtgatttcttcatttgtctccttatttgaagcatcagcctgtggtgatcatgaacacaggctctggagttacatggacttggatttggatgctggttctcccaattacttgctgtgtgaccttggataatgcttaacctctctgaaactcaattttcaaatctgaaacagggttggaagttgcaggagataatgtatgtcgaagtgtccagcacattacttggtcagtagcagacatgtaatcttaaatattgccacgttaggtctctgttaagtatgtacaattttgatcttcatgaaggcagagacactgtcttatttacctccatatcgcatgtctaactgaggacatgtcttaaaatatattttcagtgactatttgatgaatgaatgtatgaaatgagcttaacagattgcattttgtaagttgtaaaggcaaaaggaattcactttaagacgtcgaactcatttagaaagaaccagaatagttactgtgcatctagaatgtaaggaaaaaaagcaaacaagaaacaaattaacactgttctttcattagctacagctcgccattcagtcttgtgggtctggtcagtcacctttgacccctgacctcttgccttgacctaggcatacaggccattgccaagctctcttgagtctgtatgtagagagattttaagagctcatagggccctctgaggtcatttggtcagctcaacttccagtatttgtattttagttgtcaagcacttcttttctaaaggaatgtgaccctgaaagtccaatatgtaaaaacagactgaggtagagatgccatgattgaaacacaggatcaggaggtcatattccttctactgagggctttgcagatgccgttctcttggacagaaatgcaattccatcctccctgtcccaattatccggctaagtattacttgtgctttaggtcctagcttaaataacactttcttcaggaagccttccctgaccttcttttgaccaggtcagttttcccttctgtatattcatagtcctgttacctctatttgctagcacacgcctcagttgcaaatttgcatctattaatattaatttcctcttacactaggagcaaaatagaggaaagcctgtgatgagtttgtttactattatactccgggcactcattgcaaggcctggcttgcacacaattggtgtcacttaatattaataccttaatagaagtgtatctgatttaatcccattcttttccagattgcacaaatgctactgtgtccactgcatgccagatactctttgagtactggaaatacgctagtgaaggaggcggacaggagtatgcgtctagtcaggatgacagacaacagaggaatcattaatttcaatggtgataaatgcatttcatacattggacctctatgtaatatttaatcagaagataaagttcttttactgaaaaataattagtaggtttctaggccagcacattttgtgggtcatgaagtcagcagctaagagtggtacttggaatcttgtctttgtggttcatttagggtgggagagtgtctgtgaggcccagccaccttgtcagaatggaagtttcatcacccgctgatgagtgttagacagtgcgtcagttcatctcaaagttgccaaaatatgcacctacctgggtctgctttgataaatagataagaacttgtgttccttgcgagtccatcagaactcagttatcataatcatctgtcacatgttccttaaccctatgggcaattctagggaggtggctgatctagatgaaagaaggtccttcagcaactgtccagggcacttggaagaatatccaagctccccaccatgacctatgggcctgtgctgatctcggtctcttctccctgcccatcttcattttgttccatggcctctcatgttgcagatgtcaatctcaggtcctatttgaattattcccagttgcaaatcaggaaggtattaattggtgcatgttctgtaagtgctgttagaattagagctactgggctggctgacaggagtttagagggcagcccttttcctcctctgagcctgtctccccagccatcccttctaaaagttgctgggctgatgcttgtatcttggctggctctgatgccagctctgacggggccaccctggaacctgcttgcacaggctgtcgagggcgtgagaacccaagcagacaactcccagtcctacctcctttgctgtgccaggctgccagtgccagctgaggaggccccctcctgcctctgcttgtttcccttgattgttatgtaatgttcggcagcaggaggtaaattcctctccaatttccaggcccgttacagcgcatgaaccccaccgtggggagccacagtgattgagctcagcagccaggtcccatgctgagtgtcataaatcaggcctattaccagcttctcctggcagatgccatagccaagaacctgcccactgcttgcgagacccagccgcctctgcatactgttaaaccagggctgacagatccaccggggatttaggggatcttcatgacactctggctgggtgttgccaggaatcttattctgagagagcaggaggtgacacagcccttggcaaggcatctcagacctgagatctcacagcctgatgtacggggagcagaatcagggcatgatcacctgcaggctacctggatttcctggtatggtggcctcttgtgtgcctggctgtacacgtaagaacctctaggggacttgttaaaaaatatacatctcccaggtccatccccagagattctgatttggtaagtgttccttgggacatggaaattagcattttttactagatcccaggtgattctgatgcaggtggttcctggaccaccctttgagaaatgctgctttgggaccagctgtatccctgaagtgatgcctgtaaaatgaatgcctataaattgtgggtcttttttttccatttccttctatcatttggctgaagatgtgtttgcctggggaagaagatgtgggcttcaagaatcaatggcaatcaaactgaagaataagacaaatctttgactatgacatatttaaagggcaataataatgctaatagcaaggggaaaagtcccgtagtaggatgttttgctgatacttaacgtgctacagggggagctctatccttgtttctcattggctctgtctgtatgaccaaggttgtcatatgtcctggttatcctgggtcagtccaagtttatgcaggttgtcccagtgcaacttctaatagttcccccttcgactctcgaaagtcccagtctggatgacagttgttactctgtcaataacccataggattgcttcccttaagacctccacttttcttccaaagggatctgccctatagttgtctctgaaggattttgtcagactgatcccagtagtggatttcacactaaagttcaccctgactctgggctgggatgaatggtaaaaggaactctttgaccaggtaatccccctactctttccaggaaatcccggtggggaaaaggaaggtcctatgacctgaacagaagaaacagaatttggtggccagggaaagccttccctgggggtccacccttcctgtgacctgaacagaagaaacagaatttggtggccagggaaaaccttccctgggggtccacccttcctgtgacctgaacagaagaaacagaatttggtggtcagggaaaaccttccctgggggtccacccttcctgtgacctgaacagaagcaacagaatttggtggccagggaaagtgttccctgggggtccacccttcactttgggtgcatgagataagactacattttcctctcaaatatcataataaaaacattaataataagtcctaataatccatgagatgtggagaagtagataaggagttctagagttagacaggctagatttgattccagcactgccctcacggacttgacttcaagcaggttgaccatgtgggacctcatttttctcctctgtaaaatggggataaaaatcttcaacctgggagaggacttgagatatttgtaaagagcagacacttaataggtagtcaataaatggtgatggttagtataatcatcatgacaatgacaattaaaaagcaagatttaatgttttaaaaatgtttcccaacatatttcttctttcgaaggtgggggcagttaatggttttatttctttatcaatttcctcccctggaactttccaccatgaagggtaagctatgaggcttctctgaaaaacaaagagaagattccatttagaacaaaaaaacccagcatgaacatagaaaacccagtgtgggttagaaacacccaaacatttctagggaaactcaacaggagaatttatttctcaaggattttagcattgcatgggaacttcccaggcccttttgtaaagtcctgaatttagcaagatgctggaggcatgtggcactgaaaagaggttaaattagaattgggtaagggaagagttcgggagacatgcccaggacagcccccacactgctgtggcacctgagatcctatatgccgcagcggggacacacgtgctgagagctcttgcagacatgaggtgtctgggatcacaacaaagatcctaccatgttggggactttatgaccagaggctgtggctgtgcacctcagtcacgggtaccaatgggacgcccccaaagaaccatgtgagaccagtcacaccttggccgatgctagcgcaatgctcaaaaccaggtcagaggcccaggccccatacagtgatgtttgtttccatctctacttgggaaagagttggggcatggagtgagggtgggggttatggggagtcatccctttgagagagcaaaggggagatttagattttgccttgaccaaacatgctaaatgagactatttacatacatatacatattttttgaactttgaaagtctttatcacagtattgcatgtgacagaaaattgcagagcctatatgtttaacaagaggcaaatagttaaataaatgttggtacaaccttgaaagaaattactaaaagccattcatattcatatggtataggagacaccttcatataatgacttggaaagaaagcttacagttcgttaactagttaaagaagtgccccagagctctgattggcaggagatagaaatccagtcagagcagctgaagtgagaagataaattataaggtatcttagctcaggctgcctagaagcagagcctgaggcagggtttcttgggcaaatgatgtaatgaggaaacactcttgggaaaaggagctgagggaagcggggcagggcaggggatggtgctaagagaggatgtggtctctaggtgaagacgagcttcagcctgatcccatagggaactctggtgtataaagagctttatagaattgacaccaccttaaggcaaggaggctagccccgcgcacagaagccaggtgatgggtgcaccagcctgggcgaggagatcaaggcttggtaccaacagcatcaactacctaaagatagactacgtagaaaactgagaaaagaactgaagtgcatttgggctctgcaggagtaggcctcctctccttctttctgtatacctgctgtattctcctctcatagaatgactccactgggcccacactagattcatgaactaaaaggcagttcatatacaacttggtgagttatgtgatatggtttggctgtgtccccactgaaatctcaatttgaattgtatctcccagaattcccacatgttgtgggagggacccagggagaggtaattgaatcatgggggctggtctttcccatgccattctcatgatagtgaataggtctcacgagatctgatgggttatcaggggtttctgcttttgcttcttcctcattttatctcttgctgctaccacgtaagaagagccttctgcctcccgccatgattctgaggacttcccagccatgtggaactgttaagtccaattaaacctcttttccttcccagactcaggtatgtctttatcagcagcctgaaaacaggctaatacagtaaattggtaccagtagagtgggctgttgctgaaaagatacccaaaaatggggaagcaactttggaactgggtaacaggcagaggttggaatagtttggagggctcagaagacgacaggaaaatgtgggaaagtttggaacctcctagagacttgttgaatggctttgacaaaaatgctgatagtgatatgaacattaaggtccaggctgagggggtctcagatggagatgaggaacttgttgggaactggagcaaaggtgactcttgttatgttttagcaaagagactggcagcattttgcccctgccctagagatttgtggaacttcgaacttgagagagatgatttagggtatctggcggaagaaatttctaagcagcaaagcattcaaaagttgacttgggtactgttaaaagcattccattttaaaatggaaacagcataaaaattcagaaaatttgcagcctgacaatgtagtagaaaagaaaaacccattttttgaggagaaattcaaaccggctacagaaatttgcataagtagcaaggagcctaatgttaatccccaagaccatggggaaaatgtctccaggccatgtcagagactttcacagcagcccctcccatcgcaggcctggaggtccaggaagaaaaagtggttttgtgggctgggcccagggtctccacgctgtgtgcagcctagggacttggtgtcctgtgttccagccactccagccatggctgaaaggggccaaggtagagctcaggctgtggcttcagagggtggaagccccaagccttgacagcttccacatggtgttgagcctgtgggtgcaaataaatcaagaaatggggtttgggaacctctgcctagatttcagaagatgtgtggaaatgcctggatgccctggcaaaagtttgctgcagtggtggggccctcaaggagaacctctgctagggcagtgcagcagggaaatgtggggttggagcccccacacagagtccctgttggggcactgcctagtggagctgtgagaagagggccactgtgttccagactctagaatggtagcttgcaccgtgcacctggaaaagctgcagacactcaatgccagcctgtgaaagcacccagaagagaggctgtaccctgcaaaaccacaggggcagtgctacccaagaccatgggaaccctcctcttgcatcagcatgacctggatgtgagaccttgagtcaaaggagatcattttggagctctgcgatttgactgtcctactgaatttcagacttgcatgggccctgtaacccctttgttttggccaatttctcccatttggaatggctgtatttactcaatacctgtacctcccctttgtagctaggaagtaactagcttgcttttgattttacaggctcataggtggaagggacttgtctcagatgagactttggactgtggacttttgggttaatattgaaatgaattaagactttgggggattgttgggaaggcatgattggttttgaaatgtgaggacatgagatttggaggggccaggggcagaataacatggtttggctgcgtctctgccaaaatctcaacttcaattgtatctcccagaattcccacgtgttgtgggaggggcccgggggaggtaattgagtcatgggggccagtctttcctgtgctattctcatgatagtgaataagtctcgtgagacctgatgggtttatcaggggtttccgcttttgcttcttcctcattttttctcttgccgccaccatgtaagaagtgcctttcacctcccaccatgattctgaagcctcctcagccatgtgaaatcgtaagtccaattaagtctctttttcttcccagactctggtatgtctgtatcagcagtgtgaaaacgaactaatacattgacttgtccagcatagctggaagggataaattgggtcatctagatcttctcttagcaattatgaattggagaataattattgaaccagctagctatagaagctgaactgaactaaagggacaagaggaagcttggacctggggtggctaccttggtcaatttatgtagtgaagctcaagagaagtagagacagaacaagtgaaataagtggggctgcacacaggtgcctcccctacccagggcctcctttgcttggggtttggtttccacttggcctgggctttggggagtatcaaggaatggctttacacactgactgatgggtgctgagggactccccagatttatctaggctgatattgtgtagtagtaccaaagatattgatggcaattaagataataataaaaatggagatagcaataatgataactcgaagtaaggacttgctgtgtgccaagaacattcttaagcactttacctgtatgttatcatgtcttccttacaacgactccatgaggtaagaactattattatcttcctattatagataaagaacctgagatccagggagatcaatagattctcccaagttcacttggctagttagtattgaagtctgaattgaggtttagccagccagacccaggcatgctatgctatactaaaattatgcaccctcatacacacacatgcatacgaatgggccctggattcacacaactctcgagtcaagctctccttattcttattctactccagcaagcatctcaacctatcttaagctcaattttcaggggaagtccctaacacagtgtctgacactcagtaaacgtatagtagccactcagtagatgtgtcttccttcgtttgattcttcttctcatgtctgagagagtgtttgggcatctacatttacataggggtcagaggtgagcactggtgctttgtccctggctttctactctggcagagagagcacattttaccttcagagaggcaattagaccccagatggcagcactgagcttctgcacagtattggctccccagtggactaggcagaagaacatcacctccaggatccccctcaggtgtgggtgtgacctagttactggatggttgcagagaggacagaccccagttactggatggatgcagagaggacagaccccatgggggagtcagggaaatgagttgagttccagggggctggtagctcccacactcacagagtggagtgttggggatgtcaggagccctcatctctgatctgagcctgtccctcccttctgctctttccctttttcccagccccaccttctcactttaagtctctctatgtctctctttttcactctattgcttttccttccccctcctttccctttgctctttctctctcctatcttccatcctttgcttttctcctttgttcttcccccacatcttgccatctttgctcagctgccctcccctctgactactagcctttgtcttactaattgggatgggcagttccatcccaagctgccctgatttgacccctgactgtgagggctttgatagtccttgagataacagcagcctctgcccaaatgaggtttctgtcttgaacaatcacattgcctgcttggtaatgtggtttcggcttctgtaaaatggggacagagctggtgctggaccaaatccaattccccaacttgactttatacttgaagagtgtgcgtcttccacacaatgtgaaactatatagcaatacgaatgaacaagttataactacacccacagagaggatgttgagtaaaagatgcccagacacaaatttactgaatgattacatttatagggagttagcaaaactgacaagaggcatctatggtgttagcagtcagaatagtggttacccttgggggagtagtgacagaagggattttttttctggggtgctaatcacactccatttcttgacctgggtattggttacatggtggtgttcacttttgaagattcttcaaactattcatttgtgatttgtacagttttctgtatttattatagagaaaacattaaattatttgaaatggaccaaaacataactgggcatttttaatagaaatcaaggtgtctaaaacacctgttgtgtaataaagaatttggctggcctttgctccttgttttggagagggagcctctaatcccttggaatttttggactgttaagaatgtgtttgttattcatggcttgcatctcagacacacctggcttcatgctaatgaggtgactaatggtggtccctagatggtttcaggatgggagctggccacaccagaaagaccaaccatgtgattaagaggttggagcttttagtgaagtgatgtcagtttgacctctggggagtggaggcaggttagagattgagttcagtcacatggtcaatgattcattcaatccatagtgaaatcccagtaaaaattctggacattggcgctcaggtgaactttcctggttggggatgcacatctatgtgctaagaaggtagcacatcctgaggatgtggaaaccttgtgtctgtagccgtcccatacttcacactgtgggtctggtctcttctcttggctggtcctgatttaatcctatgtaataaagctgtaatcataagtatagcactttcctgagttctgtaggctgttccagtgaattattgaatctgaaggaacctctgagtttgtagctagttggtcagaagtgtgggtagactggggactttcaagcttgtggctggtgtcttaaatgaaggcagtcttgtcgaggactgtgtcctttacttgtggagtttgacctgattctaagtacggagagtcagaaatgcattgtggtacccttctgggcaatctgatttgttaaaagaaaacttcaaccaagttaaataagagtttaattgagcaaagaatgattcatgaattgggcagcctcccaagccagagtaggctcagagagtccagcacagccacatggtggaagaagatttatggacaggaaaaggaaagtgacatacagaaaataggagtgaagtcagaaacagccggattcgttacagctcagtgtttccctcatttgaacacggtttaaacaatttaccacatttgattggccaaaactcagtgattggcagaagagcaggctacagtctgtttacaattccatttagattatagttcgcaatgtactgagaaaactttaggctgaccttaaaatatgtaaggaggaggcagctttaggctagatttaacagattctataagggctcagtgacctttaatatctttgagcttttttatacctttgtaagttgtagttaactgaaagcagtgtaaatgatagctgcccatagatgtgcacattttgtctggtgatagagggataatccctcttcagtactcccaaagccagttgtatatctatttgtaaattcatttcagcatgaactgaatcaactataaaagtgtgatactttgagttatcttttgaacccatcataacatcttactgattccatagttaataggttaaatatcttcagcatattttcattttatatttgcataagagtcatgattgtcttttaaagtttaataatgttttatacttcaataattttttttaaaatatgcattttcccaggccctatatgagccatactgatccatcatttctgggattggggctacaggaatctgcattataataaattttctcagtgattctgatgctattactcatggcctaataattgaaactctgcactagacaatagccaaggctccctgtggcttcggcacatcaggatttgagagcagatttgaacctccaaggttatcatttgacgccatttatcttcatcctgtttggggttttcattcataaaggagttcctggccaggatttgcaaaagaaaataaaggttacacccttgcaaagcggtgtttggaaagccttctagccaagacttttccttcattctgttctggagtccaaccaaagaggctaacaaagaatcaggcagggctgggctgtgactcaggccaaggtagacagaagctgaagagcccccacttacttctatgccactttcttattaagctgcagccttggttttgcaatggaattattttttttttgtctttcttccttcaatttctaatgcaaacagcaatcctcagaaaagcaacatttattaaatcaggagaattacaatatcaatgggaagttatcatgcaataaccttctattgatttgtgtattgccagtaatgaaatcaactggaatattatttattaaacatattgattagcaaaaaataatttgcaaggatggaagcctgactctacaggggatcccactgagttttgagtgtgtatctgcaattttttccttttgcttggggaagagctgtagtgagtatctgacccaatacagagctagccccaagatgcagtgtccttgagagcatccactggggaagggcagatttgtagcctgttgggcctggacatttgtatgattggccagaaagggcccagaacagactgccattgtttctctaccaaagacaggatgaagtactgactgggtagagttgtttctcactcctgcttatcccagggagagagtggtggctgggaagtggggaaaagtacaaaggggcaatatcttggtttaggttctcccaaaagcagacactgaggtaagatttgggggcaggtggtttgtttgggagatgatcctgggaagtacagggaatgaggggatggggaaggtggagtgtgtcatcagtgagtgtgtcattgaccgggtagcactttgggcaactggggctcagttctgctggggaccctctgaacatatgtttgacatatatcataaatgctcaccaagggacaaagaagctgaggcattttccactagctcctgcctctcattgattgagacacattcctctttatcttaaccctctggcatctcttgtattcctgggctatcacacacattggctgagcatgttattcaggaagtgcgtagctatatgtagaaagatacaggtgcttgaggaggaaccttcttaatggatgagaatggtccactgcagctgtaggatctttgcggccaaggggatgtgggaggtgcctgacagtatgtgccacagacacaccaagcatcagtctcagggcaggttttccttgcagccatctttgatttttaactcttcctcacaggttccctgcaatcttgaatcctttctcttctttgaacagtatcttgaattttcacagaggagcagcagtatgaaaataaaaacacttctgagtgcttactaaatgcagttgatctcattcattctttacaatgaagaatgtagatgaagccactgttatctgtgttttgcagatgaggaacctgagaacacaagaacatgcagggtagagaatgagagatctggaagtcaagccagtttgtctgactccaaagtgcatgatttggttctgagtagaatgattctgagcatgggatcttgggatagatttcctggaatggtatcttggcttcattcctattagttttgtgagcttaaataaagaacttaacctctctgatcaccagtttcttcatctgctgtggggataacaaaacctgctgctccacaggcaatagtgaggattaaatgacatcatggacttggttattacatagtaattttagttaaaattcatgtatgtatcatcaccgttacccatcactgaacttcatggctgctgtactgtgcctcacctgtttgctctgattcatcccttatccttccttgctcctttctgtgtcatagggaggctgacacctgcagctgccttttccagactcccacatttacgggtttctggctgggcttagccaataggaggtgctgatgggaaattagagggttggaggaagagagaggccagggtacttctccccctctgcatcttaaggtggtagcagctatgcttctttgatggctcctgttgttatgggacactttctatgcatgagcatggcccctggctcctagtaaccccacctcctccctctgtctctgggtggtagcagcttcctgctattgttaatctctgggtttcctctctgtttggtttctcagtcctttcatcaccattacagccaatttcctgggataaaccctctttgcttgtggcttattttccttttttagattctgataaaagcacttttaatatgatagtgtcatttccatgtctgaaataattttacagttctgctgctgagatccttgtgctagacacacaaactttggacaaggcagggatgggaagaaataggatcaaggtgattgaagaaaagaagtcctaacaattatggagaatctgttacatattgtactgtttacaccttatttcaggcttggcttatttcatctttacactgtaaaactatacaactggcattactgcacccattttatggatagacaaaataagatgctcaagaaagattaaagagccatgttagcagtaggtctttgctggaggtgataccaagggaattccaatgatactcatctaaattcaaagacactccctactacctctcaaggagaggagaccttcctctccaccagcattcacaatgacaaaaaaaaaagaaagaaaagtttctgactctggttagatcaacaatagctgatgggtaattaggctgaaaaaaattgctggcacctcccaaattgacctggtgataaggacgaaagcacggcagtacttgggagtacagccctgaaaggttaatgccacactctgacatgtggatgttgttctcctggccagatattcacatgggtggcaaactcccattggtgcacccaggatttgacagagatgtactcacacttaaacaatatgtgacctaagtggacaccctactggatgtcagcagaggggcagctggctcactatgggttccagcatagagaaagagggttggcctattcccagggcagtggtttgagaatgtggtggctgtagaacatgtgtcaaatccggaggtggagtctttatccctccccttgaatgtggactggctttagtcattcacttataatgaacagcatcctacggaattgatgctctgggcttccaagcctgggtcataaaagatatacagctttgggtgggcatggtggctcacacttgtaatcccagtactttaggaggctggggcaggcagatcacgaagtcaggagttcgagaccagcctgaccaatattatgaaaccccatctctactaaaaatacaaaaaattagccgagcatggtggtgcacacctgtaatcccagctactcgggaggctgaggcaggagaatcacttgaatctgggaggtggaggttgcagtgagccaagattataccactgcactccagcctgggcaacagagtgagactccatctcaaaaaaaaaaaaaaaaaaaaaaaaaaaaaaaaaaaaaaaagaaagaaagaaaaagatatacagcttccacctggccctctctcaagacacaacccttgatgccttggacctctatgtaagaaatccggctgccctgaagctgccatctaaagggaccttttggggagatcatgtagatatagagatgcccaaggaaccccagctgtcccagagcccagccatttgagtcttcccagtctgggcacctgccatgagtgagtagaccttcagctgtttctagctccctgagagagggcagggactggggcaggaacagtgagaaggagcaacagtgctgagccagccatagaggagcctggggcaaaaggaaacaccagtaatgctgaccctgtctttaaaattttgatgttttgttcacagatgttttgcattagttttgatttttaaaaagtatcagttgaaatattatttatctcaatgactgagtttttttggcatccctttaaaatgtgtgcccaaggtgagtgcctcatttgcctcatcttagtccttgcctgtgagagaccttaagcaagagctgcctggctgatccaagtcggtgcccagaagacacaagggccataatgacattggactgattcattttgcagcaatagctgcatacaaagaataatcatggtcagtttgcctggatttaaatactgactccactaccagttagctggtgtcactggacatgctggctaaccttgccaagcttcaatttcatcatctgcaaaatgggcacaataacagtactctcttcatgggattgttgcgagaatgaaatgtaaatgttccatgcgaagcattaaacacactgccttgcatacagagagtgctcagtaaatgttagctatcattatttttgtttttgctgccattgttacatagcagttggagaacctgggagagctctgcctggataatttcatggggccaatgtccttccattatgctgcattgtaccatcgaggataattgctctctgagctatatttccattaccaggtgccatatcacagcaatgttttatattatatcattttattttatttttgtgaggcagggtctctgctgcccaggctggagtgcagcagtatgaacacagctcactgtagcctccactttctgggcccaagcagtcctcccacctcagcctcccaagtagctgagaccacaggtgtgtgccaccacccttggctaaattttttaattttttgtacagacaaggtctcactatgttgccctggctggtcttgaactcctgggctcaagggatcctctccccttggcctcccaaagtgttgggattacaggcatgaatcatcatgcctggccttactgcagtattttaaacctagattggaaaattagcaattaaaagtgttaaatatagaactatcaaatagatggactaaagacatatcaagctcttggtaagaacaacagtcttggactgacaacctctgagttaaaggacagccgtgttttcagaatgagagcacaactagataattgattggttcatcctcttccctctggctggtgttgcattttggttgtaaatatgcacgaagtgtgtgcatgtgaatgtgggactggagggaaaccatgagtatctaattaggcatgtttatatgtgacctgtgtgcttatgtgtgtgcgtgtgtgtctgtgtgtgtgcatgcatgtgtctgcgtgtctctgtgtttctacatatgggtctgtgtgtatatgtgtgtgtgcctgtgtatatctgtgtgtatgtgtgttgtgtgtctgaaggtaaactccaagaaggcaggggccatgtacttagcatagtcactggtacagaataaacactcactatttgttaaatgaatgaatgaatgtgtatgcgtgtctgtgtgtgtgtgtgtgcatgcatgtccatatgtgagtgcgggtgtttgggtttctgagagtggggttattaatgcttgagtgggtgtgagggtcctacatctgattatgtgtttaggtttctgtaagtctagaacttgaccatgcagagacaatgaattttcttgcactcctctgacccctacctgtgctcccactcatcttccttagggctccccttgcctggggagctaccctcctcaccagcctgtagccagcccccatttggacctttacttctgtgtgtcttccggaggacacagatggcaggagcacggaatcggaagcacttggcaatgaagcagcaattcattccgcaatcccttcgtattcatcgcaacaatgcctgctctgatgggctccgcgcgctgaatgcagctttcaatgtgcaatccagcgggaattgtggtgctttgtggtcctcatcacgtccacttattgtcaagtgttgctgagaattctcccactcgggatgagggaaccacttgttttagcaactgatttccgaaaccttctctgggttggggtatctgcgaagctcctggtgatgtgttattgttcctggtttgtgttttggacactcatgtgctctgctgaagtatgtaaattgccataatgtgaggaaatgtgatataaaaataactccggggcaacaaacaccagaggagctccaagattggcacagcctttcctggtcctgccttggggctagggagcatctcttgccggcagtgttggcagcaaaggcctgagatgccctggaatgaccactgcccatcctcctgcagctgcccagctggcctgctggagaagggcgggtgagacccctcctaggaaggcaggaacagctggatgtggaccgtctccttttttcgcagctggtcaacagaaccacaggctttgctctggctaaagggaatctgccacccctgactattcaggtggctgcacacactcaggggcaaattcacattcattgttggccgcccacagcccgttcatcttgccagcagggggctgtttcccaggatcccaggtcaggtggcttcagctgggatccactgggaagcattgatggggagtggaggacagcggaggggaggatggagacaggaggagctgggaaagtctctgtttccctctcctctctgactcagataatgtcttcaggagcagctggtctcctctgtggatccagaccctaaaggtgacctcctgtggtcttagcttctggcagaagacccttgctcctggtcatcccatctctcctctgaccctctggcctagcggtggtggtgatctcctgctgttgtttatctctgggttgactcactggcccttgtttggcctctcagctcttccattacccatgtgacagattcctggcatcgaagtccctctgttttaagtgttcagtagtttctttttcttgtttagactctgatacttcatcaaggacgtcttggactaccagatcttcctccatggcctgtcgaggaaatgaatcaaaaggcaaaccaggcacaagggaaacaggccatttttctacaaggatggaactgaaggggaattaacagcaataacaaaaatatctaacatttactaagttccacatgttggtcactgtgctcagcactttatacttattatcttatttaatacagtaaccatttgaggtggatattactattattctattctatatgagaaagctgaggcttacagaagtgaggctgatatatctaacagagtgtgcacgcaatggtcaggatttgaatctagcagctttatcccaggactcaggctgcaggacacagtgtgcttctccttttttagtagcacctttcaagctgtagctggtggtgctgtagttccacttgatgttacacaggcaataacaacaaagggttctacagtgcactgaaattggggacatggcatgttctatccccaccctatcttggaggtttgcaatgcatattgacatattaaaggctctgataagtcctgcaggaaagaagcacctctagttcagtgaaccccaagtgttcccctgtggaattctcgtgttactcttgttagcatcctttaggggttggtggtccagggacgtcattttggaaaatagtgccctagagaggggactcatcttgagaatatcatattttatatatatagttgtatttaatattttaagatgaattatctgaaaaatcgactggggacagaggtcttaacattgcagattgagaaaatgccttaggaatgattgcttctaatgcctttcccacttcctgaattattctctcctgtcccatcaaagtgttcgtgggctttgcctggactctcccaggactgaagcatcctccctccaaagccttgcaagctattgttggatgtcttggaggctgaaagacattcaccttcctgtaactctcatccatggactttgcttcttttctcacggggcagttcactgacttttagaatgtattcatcatgtccaccttctgtcttgcattttccagcctaatctgtttctgttccctggtgggtttgcacaccctccagggtgccctcctccttggaggctggtgccctgtgttgaaccagcagaattagggtgtgccagctatatgcagaggtgagaatagaactcctgccttttaaactttctgtatctactaatattaataacattcatattgtaaatgctgtcttctggccaccagatcagagttttcaatgagattgaatctatatagtcagcccaagctttgacatgtcctatatattatttttaatttcacagaagctgctgtttgtgtctccctcatcctatgcttctgcagatgattttgagatcctattgcaggacttagcaaatgtctctatcaaatgttatttcattagtttgacgctttatctctgttttctcttgcatctcattcacatccacagtctacattttcatccacatcgttgataaaaatgttggataggataaagtcaaccatagtgacctgggactcaccaacagaccttgacactggtctactagacaacgacttgcttattaagccctgtcataggcattcccacatttctactttcctttgattaaactgatgctcaggtatgtaaaataaaatgtacaatgagaatgcacttgtggcaggactggtacctaaagcccatgctcagtccaagaaagtttgccattcttcaatagaaatgtgctctgccttccaaccaaggctattgggaaaacatggtctgaaaacgttttgcaggatatggcagagttacccctgggtagtacaatggtggccagggcttcctaagtcacactgggctgtgtaacatgatggtgctcccagcatcctcacatccccatctttgcagatggtgatgacgtggttcccccagcatctccgacacccttcaatgaagcagtcttcattgcctcacagacccgcctgcctgagttttctacctggcctgccccattctcaacaggacagaagagcagagggtcataggtcacaccagcactaggaggttcccatgaacacctcctggatgactcattagcatattaatgcacagcctgtctcctgagaattaaacaaagttaggggtcatttaattggaaatctaaaggacagcacctaccacaatctgtccagaatttatgcacgtctgtcttgatgaacttggagggaatggatgattcacaatgggccacctgccttctgatttataacccatcatttacatgttactaaagtcaattggcacgtgcagaaggtcatcctcaactagaattaggctcactaaatctctgggggcctggtgttctagtcaagttgtgccccaatcatagggcctaggcttctatggccagaggaaatgacgaaagacctgggccaaagagtcttgggaaggacagtgtccaaccccagggagccctggcctcctggtggactgtactactcagtagattgtagactctaggtcattgttaagagcatgagatctagagtgagactgtttactttctagccctctaactttgaggaagccacctaacctttcttagctttggttttttgtctataaatggcaataataaaagtaacaacatcacagggttgtgaaaattaaaatgagctacattaaatatttaggaaagggcctagtatatgaggatgcttgctcagtgttggttatgagattctagtagttgagtggcccatttgtggaatcaagacgacttgtattcaaatcctggttctgttatttaatagctgtatgacccagtgaaatgtacttacagtctctcagtctttatgttttcataagtagtctgaagatgaagtaggtaataatgcacctaattctcagggcggtggtgagtttgagttaaagggggctatttaggtaaaacactcagcagtgtgtttttcaaatagccctgctgctctttaaaggttagcaatgtgaaagaaggttgtggtaagtctcgatttggactaccgcctgtctgaccagatcttgtttcatagtttgtcatgcatgagctgcgagctggcctgttgttctctcctcatgtattttaaatgtatttgtaatattttgttcttaaaaaataataattgtatgtttttatggggcacagtgtgatgttttgatagtgtatatattgtggaatgattgacaacagccacatttctcacctacaggatcaaagattccttgttctttcttgacttgctttcataaatatctatagctcttgttttttttttaaattttattatttttatactttaagttttagggtacaagtacacaacacttgtttttacttcttcaggctttccccattttgcctctccgaaattccctactcagaatctacctttagcccacgaacatatcaactctcctttgactaaataattgggattttttcttcccttgtctactttgaatttgaaacatccaagtgctggcaaatggattctttccatggtagaagcagcactgacattcatagccaggcttcactctcacctgtgttcagggcatggagtctgtgagtttgagtaacagcctgcagcccctgctcatagcacggagatctctgttctattgattgataaccctggtcagagccttagtgaccacctgctctgaccattgggcagcaggaccatggctgaattagcagccatccaaggcacatacagagtggacctactcaggaaacttgtgctgagtggagaaaatgatgaacagagttacaaaaattagagggtatgtttccttcttccttccttctcttaaagagagttaataagtggtgcctttcttgaggtaaaacacatagaatcaacattttccttatcaacatgttattttcaacatttaaagtaatctcagtgggttgatattttttggaaaagttagttgacttatttccagtgaattttcctgagttttcattattaaaaaaacataaactactcgtgatgcattttataatcaattcattgtaatagctaatatgtattgattgccttctctatgtcaaatcccaggcttggtgcttcatgtaccaatcccctgccatcctcccaaaggccctgagacttaggtatttgtattatggtaattgctccagctgtcccaacatacaaactgtgaaatctcagtggcttaatgtgattaagttgtatttctcactcttagtttgatggggttgggtgggctctctgttgcagttacaacatctgcaacgtgtggcccccagggtcactatgataaagggagggaggaaatgagacttttattgggtgtgtttaaaagtcaggcctcgaagcgactgacatcacttccacccatatcccattgaccagaactcagtccatggcccaacccaagtgcaaggggggctgggaaagatacaagactacgtggacatttgatagtcgctagcactattcactacatgtcatttctatttaatcaacaaaaaccagaagttcataaagttaaataaattgctccaagtcatacatagtaagaggaagagccagcaattggaatcagatctcctgacctcgaagcctatgctaccccaacttttgttcaccccatctttcgtgagttctgtcctttagagagaaaagatacatatctttggatgctagagaggtctggatatggggtcagcttcacactccatccatctgcagccgaggggagctgagagaagggataaggtccattccttatttaaatgctatgcaatccaaggcaagcagcttaactactccaaggctcgatttcctatctacaaagggtaggaactaatcatactgccacagacagaattctaagatggcatccaagatttatgtttgctgttgaacattcccgatataatctccttcccatgagtgtgggcaggatccatgaatgtgatggagttatgctacattatatggcaaaggagattttatagataaaactatggtccctgatcatttttgactctgagttaataaaaaaagattatcctgggtggtcctgacctaatcaggtgagtccttaaaaataataagaaaatgcagtagatgctcttttgctggcctagaaaaaagcgaaaagccatgttataaattgcctgtgaaggtcacattgctaggacctgagggtagctcctaaaagctaaaagggaccctagctgacagccaacaagaaaacatgatctcaggcatactaaaagaaactggatgctataaacaacttgaatgagtttggaagaggaccctgagctgcagatgagaccacagcctagctaacctgtgcctggacttctgatccacagaactcctaaagtaaatttatgttgttttaagctgccaaatttgtgctaattgactatgtagcaatagaaaccaacacacatacccatcttggagtgttgttgggagggttaattaagacaacacatgctacctctcctaatacaaggcttggcacattgtaggcatcaaaaatagcctgatgaactgagtcaaatttcccaggatttaaggtgtccagaagtttgactcttgcttctctgaggacagttcttcctttggctatggttggtatgaggggaacttgcacattcactatcttaggtcaagttccctagaagcagagcctgtgcatgtgatgagttgagggagggccttccagaagaactcatgatgaggtgagagaagcaggatgggctggggaagaagctagatcaagttgtgtgtttagctggagactagcctcagcctgagcacatggggagcccgggaccatgaatggcaccacaggctttgcctacctcagggcatggggttgggctcttgtattccaccatcaatcagttatgggctggggacctcccctagtgggtgaaggagggagctaactcccaagcatttccagggcgataagtagtgcccacccaggacaattctccaaagaatggggcagctatgagctgcttgcggtgaggcagtacctggtaaaggggatctgagtggggcaccgactgtatttgctacattctccttttctgctggtcaatgtgttgatctctcaggttctattctcagtcctttacctacctttcagcctcatagacttgaagatcccggttcaagccttttctgtgattatttggatctttcaagggtctccacagactctcatctccatcgttacacacagactccagccagctcagctctgatgtcatgcccacgccacctccagtaccccagcaccctgggtgccggctcctttaagccatgctgctagattaagtacttaaatatttgtggcccctgttatgtgccaggtactgtgctgggggtgggtgggaggaaataagggtatattaagaagaagacctttcccagagtttacattctagtaagaaagagactcatgaaagaatcaattatacaactgtggatggcgtgtagtggacacctcttgtgcctagtgtcctagcaatcttctcactgccaccctatacccccagtgcctttcactccatccattggtatgtaccagctgtgtgcaggtgtagcatgatagccccttgtctcagctgagcctcttgctgtctaccatgagtctttcctcctgtcactgctgcatgggagacctgcatgaagcctctcaataatttggacgcttgggaatttttggaagagcagaaatttaacactccatgaagcacttttggccaccaggggaccggggccctcattttcataccttgggtggaaattttgaaaagccttctctatagctacttagggcatctctgcaggattgagtcccagttgctcatagctcggtaacatattattgaatgggctttaccctcttcttgtttcattcttcccagtaccttctaccactccttgagatcacctcccaaataagctacctgcactcaagcctctgtctcaggcattgccttcaggggtaactcaggatatggcaggagctcttagggcacctaacatgccacctgccatgagcccaacggtagatagaaaggatttttctttaaaatcaatacaaaatattttacatatttatggggtacgtgtgagtatttgttacatgcacaaaatgtgtaatgatcaagtcagggtatttgagttatccatcaccttgagtatttattgtttccatgtgttggggacatttcaagtcctctcttatagctactttgaattatacaatacattgaggctaactatagtcacccagtctgctacagaatagtgggcttatttcttctaactgtatgtttgtacctattattgaacccctctttagccctaccttacaccacacacttcccggtcactgatatctatcattccactatctatcttcatgaggtcaagttttgtgtgtgtgtgtgtgtgtgtgtgtgtgtgtttgttgttgtggtttgttttttttttttttttttttttttttttgagatgaagtcttgctcttgtcccccaggctggagtacaatggtgtgatctcggctcactgcaacctctgcctcccaggttcaagcgattctcctgcctcagcctcccgtgtagctgggattataggcgcctgccaccaagcctggctaatttttgtatttttagtagagacggggtttcactatgttggccaggctggtctcaaactcctgacctcaggtgatccacctgccttggccttccaaagtgctgggattacaggcgtgagccaccgcacctggccatgagatcaagttttttttaactcccacatataaatgagaacagatggtatttgtctatctgtgtctggctaatttcatgaaacataatgacctccagttccatccacgttgctgcaaatgacatgattttattcttttatgtggccaaatagtattccattgtgcatatgtgacacattttctttatcccttcttccaaggatggacacttaggttgattccatatctttgctattatgaataatgctgcaataacatgggaatgcaagtatccatttgatacaccaatttcttttccttggtataaataccaaatagggaattgctggaacacatggtagttctatttttaattttcttgagaaatctccatactgtttttcatagtgggtgtacacatttacaggccacctaactaaactattaaccaagctgagaactgagagctggcataaagcggtgaatgggacagcgttctaggttgaggatcccttggctccttctgcacctggtgatctatttgttcctttgcgacctaatattatctgttccttacaggatccttggatgtaacagacatttggtcttctattatgacactttccaaaatatattgcagcagttctgaaaccttagtgtacataagaaccatctggagaattaattaaaaggattttcggctcctctattggatatctatcgctgcttagcaaattatccccaaatttagtagcttaaaacaacacacacgtattatcttacagtttttgtgtaacaggaagcaaagcatgacttcacggtctcaggatctctcacaaggctttagtcaaggtgttggctgtggctggggtctcatctgaagactcgattggggaaggatctgtttctaagcttattcatgtggttaatggcaggattcacagttcttcaccacatgggcctctctatagggcaatgcaacatcttgtttcatcagaacagagatgcaagaacagacagtgaggtggaagagtaagatgaaagtcagtcctttgtaacctaatcataggagtgtcatctcctcacttttgctgtattctatttgtcagaagcaagtttctaggtcctgcccatacttaagaggaggagattgaattctaggccaggatcactgggagtcattttagaaggcagccttccataggccccacttgtaaagccgcagattcaggaagtctggaataaggcccaagaatctgcactttttagtaaacacactagattggtggttattaagctctgttgcatattagaattacttagggactgggcacagtggcttatgcctgtaatcccagcactttgagaggctgaggtgggcggatcacctgaggtcaggcgttcaagaacagcctggacaaaatggtgaaaccccatctctactaaaaatacaaaaattagccaggtatggtagcacacgcctgtagtcccagctacttcagaggctgaagcaggagaatcgcttgagcccgggaggcggaggttgcagtgagccaagattgcgccactgcactccagctgggcaacagagcaaaactctgtctaaaaaaaaaaaaaaaaaaaaaaaaaaaaaacttagggaacttagaaacatccagtgcctcagctgtacccagaccaattaaatcagagtctctggtggggtgagtgcggtgtgtggagtctggatatccatactttttaaaggtctctacatgattctaatgtgcagctaagtttgagagttctggtggtctgttacattgctagcactcaataaactatgcgtcctggtattcatgtcctttcttttaatcagggctgggctgtgacttgctttggtccattgagtgcagtagaagtgacactgtgcctaagtcttaagaagtgcctggcaccttccacttttggactcttgggagctctgagaccccatgtaagaactcctacatcctctagagagagactggaaaagaccatgtggagagggagagcctgcaactgtatggttgttgttcaagccattacgttttgagggtgatttttcagcaatttctgtttcagttacctattttacttattcttccaactctaccatctggctggacttggtgaagcagtttttgaaggtggtcacttgtgtggctacattcagcaggggggatgtttggggctggctcagctgggatgctgggacagctgggcctggctttctctccatgtggtctcagagctctctgagtgcagaagcagaagctgtttggtctcatgaagacctgaaaccagcactgtatcacttttcatggaaggtggcttgctgggggccccaacacacagataccacaaaaatcagtgcttctcaaactttcatgtgaaacagatcccctggggactaggttaaaaagaggaatctgattaggtaggtctggggtggggccagagaacctgcatttctaatgagttcctgagtgatgctaatgctgctggttcatgggccacattttgagaatcaagaggctagaagatttcgttattggtgccccttgagagatacagagttctattgtaattatcttttcatacgtttattattgatccagggatgcttaaacatctttagtttatggaccccctagacacagggagtattgcagtaagtttagagtttacagacttaccccatcacctgccaggaagccttctatgaacccctgcaagtaaagaatccctaccctggactgggaactcctagatctgtgttattatttggccatgacaaacagtaggagcttaatatatgtttgctaaaaataaatggatgaatgattggctatagatatggtatatggtgtatatgatataattatatatacataatttatctcaatttgacttagaagggccttactgctaactaaccaccggagcaaattggcctaaaccctctcatgtccctgacaaactgtcagtgaaggtagggtgatcaactgtccagtttgcctgggactaagggcttttctggacataggacatttagtgctaaatctgagacagtcccaggtaaaccaggatgagttcaccctgaatgaaggtgaaggtaaaggtactctgagctcccctaagagccaggcatcagagacactgactcttgccctcatggctggcattttctgccacatcagcactgttcgtacatttcaaaagcccatctgtgcccgcaaaggagtgacttcctgtgtgcatgggcggccctgggaggctgggtctctgagagcccgttttggattataagcctttgaagacatctgcagggaagggataattcattccagaaaaacagctctctttgccatgcaaaccagagaccaggaatggaaatgaggtttttaatcacatggggcattttcagagccacctgctggctctggcatctagctgagttgcttcatgtagaggtgctgggagcgggtctggcctctgaggtcgggctgctgggaggcctcctgggtcaaggcatgagctgctgccttcaaagtcctcttgcagctgcatccagctgggcctgcagggaactgatgccaggaaaggtccgctctgagcttagcaatgatgccctcctgctgctcggaaagtcctggacgcaggacctgtcttatattttgtctctcaatgttcatgagctcctgttctatgccggtctcctcagccctgggctgggggagcaatcggaggctgaacactgtcaattgaggggcttaccagaagcacctgctcccacctcctttcctggcagactcactcatgctgtacatttgttagatctaggttgaaatctcagttcccctgtttcttgggttaggttccccagaaggagatgcttgttcgggatcaacacttgtgaaaggcaggaggaatagcaggtttgggcagaaggaaaagtcaaattgtgatacaggtccaacaaagcctgggccaaccagaagaaagccctgggatgaatatcaatcatcagagtcatcctagggtaagctcctaaggctgggcttttacaattttgctttgctctgttattggcttctctataaaggacatgacttcaggggaggtgaccctcagaagctgagacagaggctgaaggaggtcattgctgaagtctgtttcttgattgagcctcctgcagataggtataagcaattaactgaaaggagttctgtgcagcacactttggtatctactataccttgcttataaactgtttgattttaggaatgtaatttacttttctgagcctcagttttcatgtgcataattggggctactagctataaataactaataactttttttaaagaaacttcattctaataaaatatttcaaacatacaaaacttatacaaaagaaatgagtttagaatcgtgaacttccatgtaccagtcacccagcttcaacaattaccaactcatggtcgcttttgttccaactataccccaccataactactggattgttaggaagcaaatatcagattcagaaatattgtatttcatccaatagtatttcaaatgcatctctagaagggcttaaaaataaccaaacataaccacaatatgcctaactgtttttggcagattaaatgatctagtttaaatggagcatatatgacagcatttggcacacaacagggatttagaaatgtcagctatgtcaaaacacatcctcttgggaaatgacacatgaaagaagggggaaagaagcttaattttatggagtgtagagtgtcaaatatgtggcacagacactaccttcttccacccttttccctcaacagacatcactattcaatcatggagctactctgctgcacagtgttccaggcagccactgtccattcagtggcagagattaaaagatgaaatcagtttattcacattgtcctagcagactgatgaacagttctcatctggaacaatggcttaacacagagccaggcttgctgccctgcagaatatctgacaactaccatccagctgcatggttctgagtccgggctgggtcactgtgatgtacaccagctgctcatagaccacttttgccatttccagtgtagggagggagactatgcagctttcacccagggaaaattggtgagaagaagcagacctcagacccttgagagccgttcaagcctgacatttcaacatctgcccctagagcactgtcttctcattcttgctttcttctacttcagtgtctgccagctactttttggggttccttccccaggcagttatatgcttcttcttcatctcctccagccttcctcactttgttacaccctctctgaataatgttgtcatgtctccagtggacaaaagtgttgggggaaaaggagtgtatgtgtgggtgtgtgaaataacccttaatacatgtacatgattccatagtgtaccctgtactctctgttagttgtcatcattcttatgtaacactgaaacccaaaggaactcatcatattttcttctatgttaaacttcttagatcaccaggtcaaagggacagattgggtgtcctgactctgactcacattgatgcatcacagtcctggaaaatccttgagctgtggaactctttctttaaatgtaactttatgttattgtccactgtccaacattgtgggtgaattgaggtgggggaacatggtgtactgtctaccattaaagtgtggtagggaaaaagagaaggttggtttgtggaatcactaggactttggggagcccaatttaaacaccatcacattctacaagcagacacagggtataattttactagcctggagtataattctgctcttgacagaatgtctgggaatcactggttatgagattctgtattttcaaacccgcatttataccctataaaaatgtggggtttactacgtgctggaagcagctattaggataaattgtgctagctcctgaaaccaggcataagccattcctacacctgccaggactgtcctgtcttcatcatacctagcttaagccaatacaagaatgaagggaggaggaatctgagccttggttggccctaagccttcacccaaatgatcctgaaaataattgtagtgatagtaacaacagcaaatcttgaatatttgctctctctgtgttaagcacaatgctaaacacacatacaatttaatgcccaaaactctaggtaagtatttttatcttgtctttagaaactcagggatgctcagggctaacaggtgacaagtgattaaggcaggggttcagatcgaggtctccccaattctagttctcacattgtcacttgtccatcctgattccttagcctgatgcttccatgtaatcttatgatggtcttcaggaagggtgtctttccttccttgtgctcaaggtcacccacctaggaagggaacatgcatgaacacaggtgcatctgagtccaaattatgagctttgctgctttttgagaggcgggtagtacaatgggcaggatgtattgcttctgagaaaaattacctttatgtgggggctctggttcataccccaaaggcaggtaagaacagactgcttctagaagcagaagtaacctgtatcctgccatttttatttatgggaaaatagttttatttatttagtaaaaatatgcaggatgaacaaaattttgtttctatgtttttgtagactaacaatatgaatagtcctctgacaagactggacacgggaaaaagaaggtagaaataaaaattttttcctaccgctaaagaagagaatctcaattatgaaaaagatggcaaaatgtgggaatgaatgggagctcatgaggccagggaggagacaatacagtggataagtaggtgcattatctcagattgcatgcctgttacaaagacttggttcataaagtgatgaacatcagtcaccccagagattttcagtttatcccagcccagcacattcgttaatgtatagtgtctagaatatattaaatgcttgtacatatcaggcccatgctaggaactttgtatccattactttaaaaaatacctttttattttggagcaattttagagttacagaaaacttgcaaagatagtacagagagttcttgtatgaactttgtccaggttcccttagtgttaacatcttacataacccaggtatatttgtctaaactaaggaattaatgaaggtacactattattaagtaaactttagattttttttggatttcatcagcttccccgctaatgtcctctgttttcttgttctgggatctaatccaggataccacattgcctttagttgtcatatctccttagtctcctttggtctcattatttttttaaatcctcaaataattgttcctttttagagatgagaaacaggctcaaacatattaagtgattttcattggttcacaaatctagtcagttgctcagctgggatttactcagctctgtctgattgcaaagaccatgcatgcattttctaaccactgtttactatgctgccgcatgagctgcctatatgagaatcctgaacaaccaagaaatgaggaaactaagagtaccctgagttttggttagtttagagcaattgccacctagagggtgaatgaatcctaagttcacatttccagcccagacttttgctttacaccccggagcatagatggagatggggtgagaagctgcacattggcccaattggccaagtttacccatttggccaagtttacccatttcgctatcttttgaatgccccataagcatctcaaactcagcatgtctgaaaccagattcgcctttcttctcaaatctggtattctggttctttccttcccaaacttggctcatgatgatgtaaaaatggagaaatggctataagcagtcaccagaacttaaagtcatgcggagtaattccagagcagagagagcacatgttgagtggagagagagaatcagtgacttcttagtgaggggggaataaattagacatgtgatgactggttgaagcgtgctcagtggctaggagtagtccctgaggaggaggcaattcccaatcttcttgctgccctgagttccctcttaacttcaatttctgtatctgcaagactgcccaactctactatagttgctgttgtccccgagcacaggttcttgagttttccttagctcacttaccatacatctctattacttagaaaatatctagatagactgagactctcagttctgattacccaaaaaacccaaaccaaatcttccttcccccacagagctgcagaagtggtgtggctccagcttctctagaggatgcacagagggtcttagtccagaattccactgaatctgtctacttgatcctacctccctgcaccctctcaggatggagaagtggaaagcacaagatacacctgggtttgaagcctagagctgccatatcctagtcatatggccttaaacaagtttcttattctcctatggtatcagtttttctctttatagaatgtggataacgatatcttgcttagcattgacttgagaatttaagacaatgggtaggtggcaactgagagaaagactttcttcctctctctttctcatctgtcttttccatactttttgaaaatcttatattcttagtgtgaaatctttcccctgcttctctttctgcttcccacatgaggactgttagatttgatgaattcttgaataattcattcataagcaaccaaactctttgataaacagcttgggattgagggaagctactgggggaacacatgcaccaagaacaacagttttattttggtccctgctaaggtgagtgagggacacaaactgaaagctgggatgagattgcacagcatcatagagtggctttggagaggctatggccatggataggcagagagagaagagagaagaggcaactggcaggagaaaggaacaaggtacagtggaactgggacagtgggcagaagaacaggggatttattcaagtttctccggtctggtgagcaatgtgaagctttcttttcatttccttaggacatctttagtacaataccatttttgcactaacatctgtgtatctgaatccttgaaggggtatctgataaagtgctaagtgtaacttcaaggtgagatggggtgaaaaccaagggcaccctaagaaggcccatcatgtctggatttcattccagtgcttggcatggagtaagtgctcagtaaatactagtgttaatagtggctacagttgtaatttctttccagctcctttttctcttctacactaagatcttcaagagctcaggaaaatgcacctgttttattcacttctggattcttaccattggcagagtgcctggcccatagttgggttccaataaatatttgtttttatgactaacaaatccatgtaatctctgtgaccagctaagttctcttctcagctttattgtgttttcattcaatactccccatcctcagaaagctgattcattctgggacttcagctcttacatccatctagtggattactaaatttgtatatccattcccggctcacatggataaggctggcttacatggataaatactggaattgacagtatttgattatttttaacttacaaaaacaacaatttcataaattgtaatctaatattcccttaaacttccactcaaatgttatattgtcaccttcaacacaacataggtgttgtgcacttctctgcctattgactgttcctcttcctggcattgtttaatcggaaaatgcttttagaatagaaagctatcactctgtccagtagtatctttttatcattgagatgaaagactgaggttacattctgcctctgctacattcaagtcacttgcctcaagatcacacagcagaatggtagcagaggcagaatgtaacctcagtcttctgtctcctgttctggttctaggtctatcaagtgcatggattctccagcttcccaagtcttgcatctccatcttcctccttcccctcatcttctggcaatattcagttacccaccaagtccaggaacttcttccttcaaaatatgtcgtgttcatatatatgtttcccaactcaaggacctatggctgccatgttagttcaggccaacctcatctcccacttgaatccccgcagaagttcattgttaaacctctctcctgctttcttacataatacctgcctaaaggtatatatgaaagctaaagtttcaaaagtcaccaaatagcttttaaagtctaagggctgtttggtcccagagagaaaaatgattttaaaaaattaaaatagtaccatatcatttagacataatgttttgattacatatgttctatgattttataattttttgttcaataatttcagacttacagaaaaaatgtaaaaatgatacaaaaattgcctgtatgcctttactcaaactccccaaatgttagcatttctaatgtttaccattttctctctctttatacatttttattattattttttcaaaccatttttgtgagtaagatgtgaacatgatgtcccttggtcctaaatatactagtgtggattttctgaaaacaaggactttcttttacataatcacagaaacattatcaaaatctggatattagcactaataaatacaattgaacaatctacagactttatttaaatttaatcagtggtcactttaaaatcctttctagcaaaaaaagtttctgatttctgatccaaaaaaggataacttgttgcaatttgttgtcatgttctgtagtctcctttagtcaggaatagtaattcagtctttctttgtctttaattgaccttgacatttctgaagagaggccatttattttgtaggctgttcttctatttatgtgtatcccatggtgcctcgtgattatttgtgtctttaacttttatgtctctttaatttttaaatgagttaatatttgtaaattgctttaagcagtgcctggcacatagctctatataaatatttgttaaatacgctttgatccttttcttcacagccaaatatacagttgaccaatctatggccaatgagtacttgaaatggaagatttgtcatttgggggaatttctaagtattttcatctttgtttcaactgctttacctgtctgaaaactatgtttcttatagctaatatcagcatttacatttgtacccctttctgtacttaataacataataaaaacaaaaccaaatctaccattaggtcatcccacagaccctggcctgtggatagagatatcattgctgcccaagttgagttcttggctgctaggcagggtcacctggtccttgggtgctcaagaatcaaaacctgggctatgcgtgtgcagcataatggactaaaaatgtgagctatccaaatattttaagaataaaagtggaagacttttctgcaaattatggcggcattggtatggtattctatgaggtatttaatttaatgttcattgcagaatgggatttcactcaatattttttgtttgttgaattacttattgcttccttcctggcacaaaccttgtgggtcagcagactggactccttgtgtcctactgggaatgtgatgcatcacatccctgcttctgggcttttgcttctatggctccatctggatggcccttctcacatttccacctgctctcctgctcaggcctcttaagctcgacatagccccacctctcccgggccctccctccacatctgtctcttccttctcagtcccctgcagcatctctgctctgtatcacccagtctggcactaaacaagagatagatttgattctgaattagctgttccctacctcaagccccattcccccaaatgggctaggaagtctttgaagtaggtataattggaggtagatttaggtttttaaaaagttgaatttccttgacaatttaaatttgagaaaattatatttgaagatggagcatgaataaggtcgtatatttcttatcacctcaaacatggatcctatatgagctagcatttatctaaagattatttccaatgacttgccaattattgtgctattttacatgtattatttcctttaatctttataggaactctatgatgaggtggctacaggctactgttaatattaccattttatttagtagaaagctggggctcagagaggttaagcaacttgcccagggctatatagtgatcaaatactagaatcagaattttatttcaatccacctaacttcacagcttatgcctgagccactatattattctccctccatcatcagcaaagggaaaaaatagcattactgatgaaaacagaggaaaatggtggctttatttagaatgaactaacatttgttgattatctactgggtgctgggcactgttagacactttcacacatattacctcagacaaacttgagcaacgaccctggaaaggaagcaggtactcttatctctatttcataaatgagaaaattgagaaacagagaggtcaaatgacttactcaaggatacagagctcagaggtgatatgtatttctggtacatttagcttcatccggtaacacacagccccaacccttttcacttgtcttacagtagtgcctctcttctcaaatagaatttaactccacagcataattattcttgctctgaatccccactgtctcatggcgtcttttagcatcagtgtcttctagaagagcctccaaggaaaggctgctgggcaaggcactgagtgaagcaaggggggtgtatattcctgccctgccttctcctccggctgatgaagcccacagttaagatggtctaccggggctcgctccagtcttcccagagagtaatgttctgctcaggggtgatagaaagctctgtggctggcccagccgaggtattggagaaagatccatcacccctgagtgatcggtgacccacaggtactgcgcatggaacctaatgaccagtcactcaattaccggctcagtgacatgtttgtaagggtgaactttagagtgctactagggagcggacagatgaactatagctgtgcctgcagggcagagctcacccagcccaactgcctctgcggacccattacccagtaattagggggatttttaagtaggaagcaaggagttaaattatcacttagattactgcttcacttgtcacagtagaaagtgctgctttggggaaagaaggaaggattggggaaagcaagagagggagagacggagaaagagagtaatggaaggagtgtgagagagaaggctctgggaaatcgaggtttgagataagggctccattcattttctccactggcaactgtaacaggaaggtgccaagggtgaccaatgagagatgcaggtaagttgagagtctgagccacagctgaggtttgcgtaagtctctacccacagcatctgtttaggccatggtagctcatcaggaagatgaaggtaataatacaatcatagttagcaatgattgattgtatatgagccaggaacttggctaagcattgtccttgcatctgctcatctgatcccttccaccctgaaccagggggctgccactgtgatctccgctcaccagatgagaacactggagcaccttgactatgtaacctgcaacagagctggagtgacctgctcaatgccggggcccagcctcttaaacccctcaccaagcacctctgtgaggtctttacagtcctgaaacagccccaaacctgcctcttctgcagaggcaggggatgttctcagtttgctccagacttccctgtgttgagcttagctctacgtcttatttcctttgcagcaaaattggcaactgctattaatttttactgtgtgtgtgtttaattttttttaatgaaaaatattaaacaaagatcaggtagacagaattgtataacagacatttatgcactcatgacctggcttaaaaaattgttaactactgatcaaacttatttttctgtatcccccatccaattccttctaccttcctgtattatttcgaagcaaacctcaggtatcaaataatttcacctctgaatctttcagcatcaaatataaagatttttttaagaaatcaaaatacttttatcatgccctgaaataataattattatccaatctgttcaaatttttaaattttattggataattttagaaatatagacagttataatggttcaacttaccattttttgactacattggtactcaaccattctatttttcgtggtcagtacagtattcaatacattacatgaggtagtcaataccttattataaaataggctttgtgttaaatgattttgcccaactttaggctaatgtcagtgttcctagcatgtttaaggtaagctaggctaagctctgatgtttagtaggttaagagtactaaatgcatttttgacttaatgatattttcagtttatgatggatttattgggatgtaatcccatcacaagtggaggaacatctataatttatttgtttaaattaggatccaaataaggtcggtacattgcagttggtcggtacattgcagttggttgataggtgttttaagtctcttttattcttttttccttgatatttatttattgaacaaactgtgttatcttaaagaatttcctacagtctgcattttgatgattggatcttagtggtatggtatggtttatcatgttcctgtgtccctggtgttttctataaattaatggttacatctagagttttgatcaggttcaggtttggttttttggcaagaatacttcatgtatggtactgtggacttctactaggaagtctggttttctttctttctgaagttagcaaccactgaagattgctttaatctggtagtttttaattacttcattcttttttcatttattatctgaattacattttaaagaaatcttattagctatttgtgatcctgagaaatagtttatataggagaagcaagttaatgcttactttcttccctttattttctagtttttcaaataatgagttggttctctagtattctacataggatgcgaatgagcttattttattttattattactattattttgtacccatagactttttaagttcttggtaaatttcaatccattacagttattgttctttttgagatccaaattctcctgtgtctggccattgggagactttaagttgactcctgagtttttcaaacatgatcacatggtttttagtagcttcctgctgtctggtttgacagtaggttccagactcatctcctacactttctttttcaaacctagtctcaggcttttgtcagttaagaatgacatttagatagcacaattttcattttggagtactcatggctactaggtttgtcattgtctctagggcttttttgtggataccggtacaaaatatgtatcttgtttaaaagagaaaacaaaccttgagtttatattgatactctcaattcgtttttacttactttctttgatcattcatctgtatttcttgtttctcctgttgagtatcccagttcccaaaggtaaccacatttgttctatgccaccatgcacactcaattgtctcagaggagcaataccagcactaccactaaggtatgattagtaaaaacaacttaagggtttttatttttccttaattcatttaggctggggatgtcctgccagattcctgtatcttaaaatcacttgacatagttttatctgtatggttgtaccctcaacttcatgtatagatttattcatgtattccattttactttaattttataacaattgccttttaagctgtatttattaaattactatttcacatgtcaataatacacattcattgaaaaacataattatatatatatttttataatgaagtaaaatgcatatgtgattccacagtcaaacctacagagcagctccttctacactgattcacagagctcctcagcagtattaagctccgagtaccacatggaaattgacttgaaaacacacacttaatggctgctttttcttctcccatcttactttctcacagccttatcaattttcagggatcacatcaaataaactacttttatacaactctttgtctttagtcagcatctaaagtaactcaaatcaagacacacatttttctctatcttgcttttcatataagaaaatatcctgaattttcacttgatttcatttcacagtgaaatgatcacttcatcgttctggagataaccatggctgctttcacggaggctcctccaaaccctagtgccttgctggaagggcctggaggagctggattgagcaggcacgttggagggagatcccacctgagttcagactgtggacactgctgaagttctgggtcagagcacacatctattccttgagaagtagggcagtggctaagagatttgattttgatgccagagtaactggagctgaagtcctggcttggcaggtatagttgtgtgacctgagcaagtcacttcccatctctgagccttggtttcttcttttgttcaataagcataataatggcgcctgtcctataaggtacattggtgaggcacaataaataaagtgtttagcacatgaaacactttctagagatatctgtaatcaccatcacctctaaaataatgagactgctctagttcctttctgagtgcagactgtctttttttaagttttattttattaagtgataaataataattgcatgtatttatgaggaacaaagtgatatttctgtacatgtatacattgtggaatgatcaaattagagaaagagtagttagcatatccatcacttcatatctttatcatttctttgtcttgagaacatttaaaatcctctcttttagctattttgaaatatgcaatacattattattaagtattttccaggcttggagtccttggttcttttaggaagtcctcataggatatgattccaagaccctctccgccctgggttgcagcaagtccagacgtggctgtaaatcagatatggatacattcttgatttctattcaagaaatagacaccatcctcccagtgtgacatatctgccagagaactcaaagaactcctaatgaaattttctcattaggaatttctgtgaacttctctcatcttgaatttccctgggtgttctctgccccatggcctggcctttccccatacggatcagggaccttccatctgcttaggccctctttagccctctcctaggaccccatccttctttccaacaacacaggtatatcctgggggtcccaacaagatatttttatgattagagaagtctaggtatttcctgataattgatcatttgtggtgtaaaagtgttttaactctttactctgaaaagaacgtctgtcctgaggataggtaataaaaggaaagtatggcatgaccctcttctcgccaaggaagcaaacctggaagatggttggaggaaagcaaaggagaatatttacaaataaggaaaagtagaatggagtttccttgtctacttagtcagtctgtcttgcagatattttgaaagaggcaccccttagtaggctctatagccatctgtgggtcagaggtctcagaggaaggaaggggtggctcaaatacaaaatggtacccctaagggccgcgcaggtcccccaatcccaaacaatactcccatgtgccagaggtgaaagtgatgatccactgagctgaagattacctagagttttgctaaaattctgagcaggaggttgataaattatcccagggaactaagggttgtgtgatatgaaacagatgcatagatattcctggcagttttagaagaagggtctagtcctcagagagatggcagtgactaggtgggactatgggatacatgtattttattagatttaaagtatttttggatagtgggatacaacacagagccactcagatagatggagaaacagaactctttgttacttacagctccaagtgagtgacaaaaagaaggctgccatgcagggccatatggggttgcagtggggatatggtaacagcaagctggagcaataggaggtggcaagtggcatggaggtagctaggtttcaatagctaatgtgaacaattatgtgggctcctgggtttagggtttatttgtttggtacttggccctggaaaatggggacctgataagggaagttcttggggtgcttgcatagtggcccaagggagtggaagccagataaagaaggtgattggcttagcaaactgcccatgaagggaaattgagaatttttagccataatttcaaaactgggtcaaggcagcacttgtgaaatgtcaccctacagcatgtcaatggggttcagggcagatcctcagccttggagaaatttaagttaaagttgggctagaacccaggcataaggcttggaccaaatttcaggaatcaaaacagggaaaccaaatgagtgacatgcatgccattaccatcctttgccttgatcatggcagacattgccaaccaaacacaattctcctccttactgagcctggactcagccttgaatccttctcagctaccatccctgacaagcaacaaagttgacatgtaattttcaacccatgactacacttcattagaagagagaattagttaaggggcatgtggctatctgggtttcctgtaatttgaaatctatggatagcaaatataattccagatcccacccactggttggactaagtgtttctcttcttagcagcattgttcagggactgagagaggctgagtcataaagggctgggccccgggacagaaagtgacatggagctggagaaggcagagtctaacagtctttcaagcacagcacccaatcaaaaggaatgtacctctagtgcggaaacattggagtagccctaagtaacccattgagaagccagtgttctcaaccatatatagacggaccaagacccagccacaagatatattccagttgtggaatttgggtcagcatgtgaaggtgggatgtgatatttgatcttttttgaaaatatagctacccaacttcaacttctccccaaagctatgctatatctgtatccttttctgaagtattttattaatcatttcatccatatttctcttcacctcagacttcaaattttgatttcctctggtatttatagcaacatctgtggtttctcaaggcgcacaaggcaggttttaggatgaaggtattttcatggaggctggcaagatatctgaggttcaacaacaggcagctgactcaggtaaaatgaagccaaagagaaaccaaaccttgttttcttgattttgtttttcctttcagggagggagagatcactggccaattttaatttaggtttcttctcccttagttatccaaagatgcaatcaataaatacctacttgaaccccctactaggagccagattgtgtactaggtactggggatacagtaagggaaccaaaccagatatggtccccagcctcctggagctctcctgggagaaagagagcttaatctaattaatctcataacaacatgtaaaatcacgtctgatgttttgagagagaggtatatggtattaagaaagcttatgataggggatttaacatagtgagggatggcatccagaagcgaatgataactgaaatgaaagaaggatctgaaggagttggagaaataaaaagagttatgttgtagtaggaagggaattctaggcaggtggcacagcctgtgcaaaagctcagcaactggaaaagaacatgaacgttatgtgacaggaagatagagtggttggaaaagactgaatgagagggacatgatggacaatgagtaggaaggagtgctcagggagtgacagacctgacactgtaaacaattcagacgtggatttactgagaagctaatagcatttaaatttcaagaactctcatttgcattggggctttcaagaacacttgaacaagggcatgaatgttgtcaactcagttttcttttctttcctgttttttttttttttgagacggagtttcactcttgttgccttgttgcccaggctggagtgcagtggcgtgatctcggctcaccacaacctctgcctcccgggttcaaacgattctctgcctcagcctcccaagtagctaggattacaggcatgtgccatcacaccggccaattttgtatttttagtagagacagggtttcttcatgttgatcaggctggtctcgacctcccaacctcaggtgatccacctgccttggcctcccaaaatgctgggattacaggcatgagccactgtacccgaccacaaacagttttaagcttactgattacacaagaaaacttttgaaatgtcctgaaatctcacagctcatctataaaataaactggataggaaatttttaaaatttgtccacaatcctaaaaatttaggtggcgttgccaatattaaagctgcgaagctgaaggataccagttttactccaccacaccagagggaaaatatttcagaaagtctgagttccttttcttttctttctatagaaaatgacattacaagctcattatcatatgaagaggagatcaaagactatgccggcaacaaaatgtaggaaaaattgttatagagttgtatcagtctgctaattaacaaaaatatgctatttttcaggagtttgtaatgttagtggtatctgccactttaacaaattgtagtttatgagttattttcatattctaaatacatattcaagtttgtgtctaattttgaatgcagaattttgtgttcttaactgactgcccactgttagtcattgaccactactatcaatcttccgtcctatttccagggttataattttgaagtataaatcattaccaggtctctccaactcttaaaacccttcccttgtatgagtgggtggtaccaggcccctagagatgatctttctagactcagctctcagcactgggtggattcattcatgttcaggcagagcggtatgattaacagagaggctgggacacagggtgcccttgctcctccctcatccttatcggaggatcttcccaatgtatctggcttcaggccaatattgagggttccacatagaggcagggagagaacactggactgtagatctcagtttgaagtcagcctctctcacatactacgtagtcaagtttctgagtgtgtaaaccagaccaaagactctggaaagatctgcacgtaaacagtgcttgacagaaaggcagcagcagactactaaagatataagattgccttagtagcctcagtagcaagcaaaatggaagatatctgtactgaggcaagaaacgcaaagcaggagatgatctgtaaggctgtcatagggacacacagcttatttttttggtagtggaacattttaaaaacttaatgcataaacatatgaccttttattaaagagaaattttatgtattggtggataaggccaatggttacatgtactggatgctttaaaaattagaaccaattagagtagattctttattctcttggttacattgtgaagtgtcttttatggtcatatgctgtggttggaatgacagtgtgcacatatttcaagaaaattagaagatacacgtgaacaccaaatgttctccccttttttctgcagtagtcttaatgattttctccattatctcataggaggtggagggagattggtggagggattttcagtggtcactgttttcttcacatggtcttgaatgatgtctttatacatgtgttcagctgtgaaaatctgctgttcctcatcatagccaaaaaaccatagttgtgccatctggtaatatttaccatatgtgatgtaaaggtcacaagttttggtttgcaaaagagcatcttcacctccaacatcactttaagctttacaagcttcttctattttcctttcatctagggtagctttatctgcttccagcaacccactctcttcatattattccataaatgtagattttccttcatctttttcttcttcctctcataagactgagcagttttcgagttttataccatttttgcttgtaagtataatctcctcaacctatttgtttattcctgcaattcctgtgctgtgatgtgtatctacccaggccctaccaccatcatcttcagtgatagcttccaattcacctgaatatgccatctgttttgactggatgtagcatgccacatttttggctaccaaaaattatttgcctgttggtagctatgcctctcttttcagttcttcccctgtagcccattgctgtgtcgggcagtggacagctaagtgatctccagctgccataaactcttttggggtggtaacagctgtttccttaaactgattccttgagaattaggtcaggtattcagttacttctaatgcctttccttcaccatattaatcaattctggatggatgctggggctggagtagtggccagccccacaatgggatgggaaaggtacctaagacagaggccagggagtcagtgcccccgtgacatgaatttgcatcacatgacacatcaatatgatgtgaggactctgcagatttttgaggcatcttctgccattctcaggggcaaagagatcatgaaatatacaaaaatgccatcaaacccttaaaccaaagcatcacagttatctgttgtagatgtatggagaagtgaaataccctaaatactgcccaaatcattgaatacaagttttgattcccaggattataggttcttaaaattgagaaattaaaagtcacttaggatgacaaaataatttgttgttcgaatagtgaagaacaattttgagagtaaaagcaggagttctttacggttatgtcaggacagcagacataaactggaaattctctgggcacaccaggatgagtgcttgccttgttcagacctcctatttggaggaagttagtttttgatttgcaagcatatccagtgttcgttcagtgttccttgcacagccactggtcctcagctatgtgggaggatcaagtcaatgccatcccattcctaccttggtgctatacagaatcaaccagacagaaggaatttacctggaggccatcaatttgggggtcctcttggtatctttttacttttctagaatttgcagcaacatgcctgcttgctaaccagtacacagaacctcagtgcattctagaacgtttattgcaaggccaaatatgttagcagtcacttccagaagatcccttggtaatttacccagacatcccagaagtcctctttcccccaagcccctcagctacctttttctctggatagttctaacactgacctggatctgaaacctatagttccaactccacttttccagagacacttcactcctagagttcattggattagaataagcttttttttcaatttaccagagatggtaaattgggcaaagacattcatttaagccaatggttctcaactgggggtgattccattctcccttgcccaaggacttttgcaatgtctaaagacatttttgatcactatgacttgagtgggtgaatgaagcaactgacatctgatgggtagaggccaccagttctgtggaaccacattgcacagaatagcccttcacctttccccaataattatcccatccaaatgtcagattccaggttgagagactctgatttaagtcaatgaataaacactcgaaaagggaataaaatgactatgtagtggtactcacattcctcaatattacccccaaatgagcaacttcctttatgtacactacctcctttataaataaactgataaattgtcataaagtcttgtaacttaagtagtagagagcttttctctgttagttttaactgagaagttgacttctttatcttacaactttgcaaattgttacagtgattttgagcaaaattcaatgctactcctacttctgattcttctagtgctgctgctaaacagtaacgatgtattgaatgtttactacataccaggcactatgctaagcacttatcatatgttatctcacctcccaacaatcttgtgagctaggtactattaccattgaactttactcctgaagaaactgagggttataaaggtcaagggacttccccaacgtcatcaatttgctaactgagaaagaaaggtgtatgagtccaggtatatctgtctccagagcatgcagacttagatgctatccttgactccctttctcaaagcaattccattgatagattctgtgtgtttgatgtcattagtaagcagtgaagaattgctgagggaagcttcttgaaaaaaaaaaaaaggatcagattcggaagttggcttactgtgacaacaggactactcccagtctagcttgtccatgaagctgctgccatttatgctgcagaatgaagagctcttatagtagattataaaaatggccacaatattatgtagcttcttccataaagaggtatttctccactccattaatcaggactgctttttgccttccttttggccaatagaatgcaacagaaatgactttttatgaattatgagcctgggcctctgctttcgtctcttagaacctgccactaccaaataaacaagcctaggctagtctggtggatgggtagagacatatggtcaccccactgaccaccagccaacccacagaagcagaggcatttagtcatgatcagcagccaatcatgatgtatggggaatcccaaccaagatcagcagaagaacttccaacctgagcccaaagcaaattgttgacccatagaattgctgttttaagttttggaggagtttgttatatggtaaaaggtaactaacactcatgtaaggtgtctacgtagtcttcaggctctcaggcctagaagaaaaaagtgtcttagacttttgggataaaatatccaagaagcccttgcatatatgtcctaggggtttggggaagacagaaggcctattcaggatagggtgaatttaaaacctagttgccaaattctttgacactgctccaattgaaatgggaggttgtgcactttaaccttggatctgagtactgtgattgcttgatcaacagaatatggtgaaagttacactgtgttagtttctgggcccaggccttaagaaactggtagtttccacctactgtctcttggaacactcattcttggaactcagccaccacgttataaggaaggctaagtagcccgttgagtggcccatgggatgagaaacatgtggagaagaatagaaacccttagctggccctcagccttgactgagctctcagatgacagtcttgtgagtgagccacttcgaagtggatattctaggccccagtcaagctgcccagctgatgctgcaaggagcagagatgggccttccctgtgcagtcctgagcaaatgtacatttgtgaactaaatacagatgctctttgacttatgatggagctacatcccaataaaaccactgtaggttggaaacatcataagttgaagatgcatttaatacacctagtctacatcatagcttagcctcttctactttaaatgtgctcggaacacatattatcctaatgttgggcaaaagtcatctaacacaaagtccataaatcaagtgttgaatatctcatgtaatttattgaataccatgctgaaagtaaaaaacagagtggttgaatgggtacttgaaggacggtttttactgggtgtgtattactttcacaccattatgaagttgaaaaattgtaagtggaaccaccatagttgagaagcatctggaaatgatttaatccaccaagttgggaggtggtttgctatgcaccaataaataactggagggatcctggagacatgagattctccaaaaacgtggtgaatgctttgctttgggggatgaacaaagggcctttctcccagcagagtgcttgagggcctgttttatctttctcgtagcacttactgtcaccacacatgtgcttgcttattcaagaggctaagcaatgaaaaagcagggactgtgttctcatcactactatatgcccaggatctagaacagagtccgacacacagtaggtgctgaagaagtagctgtggaatgaatgcaaagatggaagacagagagttgacacaatgctcagttctgattttgtgccaggacttttacttacagaattttatgtaatttcaaccttcagagaaaggcattcttcctatcttacagataaggatactctggcactaagaaaggaaatgatttgtacaatatccgacaactattaggtgggtaaacctgggtcctaacccaggttttttgaatctgtatcttaaactcttcctacaatgctgtggtgctttcctcttttgggcccagatgtccctacgaggacctaataagggtattttttacacacagcctgcacacacacatgcacacacattcatacacacaatggttgcatatactttcaggactcacagactcttggtataagaacccttttcttatgccatgaaaaggaaaggcacctggttcttacagacttttgctttgtgccttttcttcagctaaattgagttattaactaattatggcttgtgaagtcctcggaaaatactaaatatggttattagtgaagctttgattttagagaacagcaagggagtcctgaataagcaaataacagttgtgtagggaggctggcagccgacgacatgctgcggtgtataatcaaactctgcgaggctgtcaaaggtacttcagctcactgcttgctacattggtccttactgggagtttatacattttcagagaacaggattcattactaattgattgattttctaaggctccccatgtttcatcttccagcatctatttaacctttattctgcactccgcccccaaaccaactcttttactcacagcagataactctacctcttcttagaaaaaatagaagctccacctgaatttcatccctgcacccccaaatatttccatctagattattattacatctttcttggagtacatctagattacataccatctagccctgcttgcccccctttcagactatgcccccttcagaactggctttatgcacatgtgacttgtgcagtcacacaggactccactgtcagaaaggccccttgtgaagacgatgctctgttattgtcaccttgaaatttttcataatttttgaacaaggggccccatatttttatcttgcactgagccctacaaattacagagccagtcctgcccacttccagttgaatgtttgatgtgaatccttccagttataactgtgcatgttgctccaaagacctcacttcatcaataatgtcttgttctttcaactgttcccactatactcactgacaactttcagtctacaattcctcatccaaaagaaatgagcaaaattcctctgatcaaggtaatgactgtcagttctatattgggatatttttagggggtttcaagggacagaaacctaagtgaaactagtttaagtgaaacaaggatgtttattatattacatgaacaaattgtggaagagtcaggagtggagctggctacagggacaacaggactctaagatgtcacccctcttcatctgtattcgtgtccccatgctagtgtttttctttcagttatttttccatgtgatggaaacttgtctgtaggtagtgccagaccagattcctgcggcttggcatcaaagagaaaagggaccattgtcatctagtttgaataaatacaaaatctgatgaagagttctaattgtctctacttgggtcatgagtttattcttggaccagtcgctgtcacctgtgaaaaggggcactctgattggctgttgagatctgaatctcattgttggagttctgggagagcagttctctatgggaaggtgagcatgatcatgggaagacagagcaatcagtgtctaccctggaccccttctacccagaatctcggctctctctttttcccttcatggtcaatgccattgcaaagccatctatttgaaaaatagtctacattcactcacctgacttcttcacctcccaccacctctaaatatttttattgtctctctgaaactgcctttgtcaagatcatcactggtttccttgtggtcaaatctataggtaaatttttaatgacctcttattcacttccttgcaatatgttgcatctggttattctttcttaggaaatctctcctttcttgttttttattttttcctgggctttgttctccttgtctttcaaaccagctcctccaaggtctgtcttttattgatctcagtttccctgtttctgggcttgtctcctgatcgggttctttaacatgtcccatgaatctgccacggatagcttctcttatccctgatataccgtgcctactagtgctgaccatattttgccaattcagtcatccaggagagaaaaaacggtgaaatgggtttggttcagggtgtatggctattaacaagaaaataatgagaagaattccaacaattattaaaaaggtagaatcacttggacttgatgataggttggaaatggagagaaagagagagggagaggctgaaaataccttttaaatttctggcttgggactaggtggtggatgctgccattcacaaaataagggcagtaagtgtgcatgtgattaaatgtacatgcttttgagttccgggatgcctacttgggtgtacatacacatacgtgtatagtacatgcttatgtgaatgtacttgtctttttgtgagtgaggacttttgagcagttggaggtgtggagagcatgtggtataagtcaaggtatgcatgtgtgcagggtggtcaggaaatgaagacattcgcatatgtccacaggcatagaggtcttgagtcccaccagctgtgtaccccagagcctgtagttctgaggaatagccctgggcaacaaggaccaacacattctcttagcttatcaccagtctgttccttacattgtgcctgctttaagaagtcacacagcatggagtgtgcttaattaaattccactacaactttaaaaagagctaattgtagttgttagaaacatcaggtgcacattggctgatagaaggagacgggatgaaaggttgaaccttttctgtaatccttctcacctgccctggatctgaacttttatcagtctggggaaatgggcttatggtgtattcagtattgattcctgccatcttgttgatttgcaactctggaggagggttgagcctgccactggagctaaagaattccagttttggagcaacatcagggcagatgagggctttctggatccagaaatgggaagaaggtggggacagagtcaaagaaggtaggggcatatggaggcagttttacacttattactctctcctttttggtatcaaatttattttagggaaacacaaaccatcctcttttgtctactctccacttctgtcagttcttatcttcagtttcctcacatgtaatgtaatgttaataatgatatctattacattgggatattttgaagattggaagtaacagacgcaaatcacctatggcccagggcataccacctgttgctccccaccagtgggttgtggtagtgattgtggcagcagtaattgtagtagctgtgtggtgactactaaaagtagccacagatgattgttgaacacttaaaatgtggctagttcaaatgacacgtgctgtaagtgtaaaatacacgctggattttgaagacttggcataagaaaggtaaaatatcatcaataatttttatgttgattacatcttgtcatgatactatttgggagatattgaggtaaatggaaatatagtattaaaattaatttcatctgtttctttttacattattaaaatgtactcgtaaatttaaatttatatatgtgggttttattgtgtttctgttggacagtgctgttctagagaattcaggcaagaggtagtaatcatcagttccagaagtactgaattcttctggagtacagggatgaggctgataactccagggatggaggctactgagatcaagtttgacctctaattgctggaggtatcatgcagaaaaaaatgctcagacacagggcctcaagacagaggccctgtcccctacccacttgacactaccccagcttgcttatggacaccatcatctcttgcctggatggctctcacagctttcttctaactggtctttcttctaacagctttcttctaactgatctttctgcatgtctccaagaatctagttttctgtcactcctaacagccagagtgatttttaaaaatacctgattctactcaaagagattcatttaaatccctttcaggcagtctttttggaattaaatctaaggtccttgcaagcctggcctggaaggtcctccatgatctgctctcctgcctcaatttcctccattctctgcttcactcatattgcatgttgctgcctcatgagccttcattcactaaaacatgccagctgctttcctgtctcagggactttgcacatgccatttcttctgcctgcaacattcttgcctaacacctcacatagctggtaccttctcatgcttcaggtctcagttcaacacatcatctcctctaagaaatcttcttcatccacattctctaagtgccctagtttccctcctactaccatgttctttttgctcattccattatcaccatttgatattaatgtgattactcattcaatctttcagtcatcactatgctgtaagctccatgcaatgggtccatgtctgtgttgtatccaatagcacagaggctgtcatataggaggcacttgggaaatacttgctagaaaaagaataaataaatggaagtctgttgtctgaaccaggacacaagttcaatgacagccttaacaatgatgacctgatggagaaggactgaggctctgagatggggtgggaaggatcagccactccaggggagggaagaagaaagacacagaggctggagaagcaggcagggcccagcctgagcccagcaggggcagcttggctctgcctcatcacaagaagtagcttcagagctcttcaaaggaagcgagtcaagatgggtcagtccctggaggtgtcactggccctcagaaggcctctgccagggtttgatgaagcaccttctgtggcaggtctcataattaactgtgaccatgcagtgtgttcatgcagatgtaaatcatctggcagatactttggggcttatctgctaatgaaaactccttcgcatttctgtaagcatattatggtcaattacaattaattcagtttgcatcgactgccattttccttatgcaaagattgtgcaaatcgagtgtgtgagccgagggctctgaggcctgtaaaatccataatggttagctttcagggatggtgaggaaagaataaaactgtgggctgtttgaaatttaaatcagagcagggctggtcaatagaagcagaatggctgcacttggatttgttgggctggctgtgctgggggactaggggcatcttcctactacccaaggttacagggtcacagagtgtaccctgtccctatcagtttcttctctgggctccacttctgcatttctggctgcagcctctctaagacccaagggaccagacttcctgtctgaggactcatagccatgtgactcagattactgctacttgaagagagatgaggttttctctttttctttcccatagctccaaggagtaagttgggaagatagcaggtgttaaattgttaaaatttcgacttctggaccagctgacatttgttcactattaactgtgtgccaagaattgtgctcagtgcttatgcatgttttctaggtatgtgtgtgcatagcacacgatcctatgaggcaggtatttgcacttcataaactttatagatgaggcttagagaggtacagtggcctgttcatgacatacacctaagaaaagtttggtttgaatctagattttaaatcactgtattatacaatcactgggaggactgaatcgtataaaaagtgacattcagtctctattgcttttgttgtcagattcagctgcagtcaatacctgaagaagagaatggttctatgtcatttctccttttctgtaaggagagcagagaccacagggcttcccatgaaagtcagggagcttggcttgctgggcattcctaggcaggcaaatgacagagtaggacttcggttgtcaattgctgtacaagctaggatgacctctggccatgaggtgtgttggaaatctctttcagagtagcctcttcttctgaaagaccacactcagcccaagcatctagagagaacctcagaggctgcttgaatagtactgagtacagtggaatataggtgcggatctgtataggttgtggatttattgttcaaattttcttgtttttaccgaacttccaattgccatcaccttcatttctttacttaaggtttctctggccatgagggtccacgtggcccaagcatgtgacaagccagaagtaccagagaattaacattcctcaggagcatccctcaaccagtgagcagtagaatttgatgtgtaaatacctcaactccctcacccctcaggtaggataactctgcagtgcatgtgcaatgctggcttctggaattccccggcaggatcatgctccagttgcccatagcaataacctggttgataatacacactttattgcctgctttttcttccttctctcccttattggtatttcccgagatcaccttctaaataaaacaattgcacttgaatctttgtctcagagtctgcttctggggaaaccaaactaggttagctcctaaacttaagcataaactgacttgcagcactggccatgaacacaatagcaaagacagggaaacaacctaggtgcccatcagtggtagattggataaagaaaatgtggtacatatacaccatggaatactatgcagccataaaaaagaatgaaatcatatcctttgcagcaacatggatgcagctggaggccattattttgagtgaactaatgcaggaacagaaaaccaataccgcacgttcttacttataagtgagagctgaacattgcattgggtactcatggacataaaggtggaggaaacaagaaacactggagactactaaagggtgcagagaaaaaggaggaaagggccgaaaaactacctagtggatactatgctcactacctgcatgacgggatcattcataccccaaacctcagcatcacacaacatacccatgtaacaaacctgcacatgtacccttgaatctaaaataaaagtggaaattataaaaaacttaaaaattaaaaccttcaggcaaaaactctagggataatgacacagaaaaggttgctgcctgggcattagaagaacaccacacccaaatagctcaagcctgtggccaaagataagaacttggaggcatctctccttcctagtagggctcctcactttcccaccacttctttttaggcatttagctgagaacttaaaaggacccacaccatattcccttatatatattgttagttgccacgtgtgctctctgtctgcctggctcttccttcttgcgttgtgtgacctggggatggaggaggaatgctgtgtgctcctctctggccaccttgcatagctttaggatccaaaagtaatttaggaacaatgcttgaatttcacattgtggttgtgtcattgaagctgtgctcacaatctaacccctgatggtgaggtaaggatctcacataggtggatttgttgctggggctcttctgtttggacctccgtcagctgctggagatggtagctaccagctaagtaacagagaaactcaaagacttttgtctaaaagcctactgcaaaaagaaagtttgatgatttaaaaaattatttatttattttttgagacagagtttcactcttgtcgcccaggatggggtgcaatggcgcgaccttggctcattgcaacctccgcctcccaggttcaagcaattctcctgcctcagcctcccaagtagatgggattacaggtgcctgccaccatgcctggctaatttttgtatttttagtagcgacggggtttcaccatgttggccaggctggtctcaaactcttgacctcaggtgatctgcccacctcgacctcccaaagtgctgggattacaggcatgagccacccatgcctggcctaaaaattgtttaattttaatcatacaagtaaacataaatatattcttatggccaaaaaaaaaatcatactttatggatactgtcaaagtccccattgaccattcttcctagtacctttcctgaacagaaatgaccattgtcattattttggcatttctctttccagatactttctatacattcatgtgtgtgtgtacatgtgcagcaccccaacactcaatccactctacattttgacccacaatgtacttttttttttttttttttgagagtcttgctctctcacctaggctggagtgcagtggcacgatattggctcactgcaacctccacttcccaggttcaagcgattctcctgcctcagcctcctgagtagctgggataacaggtgtgcaccatcatgcctggctaatttttgtatttttagtagagacggggtttcaccatgttggtcaggatggtctcgaactgctgacctcatgatccacccacctcggcctcccaaagtactggcttcacaagatatttgagagttctttccatgtgagtacataaaattttacctcacttctgttaaatgctgcataatattgcattgtgtgaatttagtttagtttaactactcccctactgaaggatatttaggttgtttccaatctatgatggcttcagttgtgggggcttcctcctttgagcatgggctgtctccctgagggtcagttcccccaaattaagggctctctttgcagtaactttcttgtaaatcctgaaacagccacaagctagttataaaatgaagatgttatgaaaaccagttagaattgctggggaattccagacaacatcacgtgactcctccaagtccctagagaactagaatgagactctgaagaggtgggttgggacaggatgctggagagagaagaggggcaggggagagagcagggggcataagggctgaggaagaggagtcttttttgctcctaaacacttgaggttccatttgctaatttattgtcagaccacagaaaaattgatccctcctgctccagccagatgttgctttcttgagttctggccttgcccccatagctctcaccacatcaaggagaggactagcaataagaaatatatttttcttcagtaggattgaaatcccccctattgtgttcttcttcaccatctcagtcagggagcctgctctgggaatcataaattatcaggttaaaccatgtgaaggtaacacttttcaaagtcaaaaatggtcaaataccatcagtttcatatggttcaactgaataaattttcggagcaattccaatttatcttttaagtgatggggttaagatgacagtttggggactttgcctgtgacccttcaaaattccggggtaggacttaggatgctaattgttgcataaggtagggttgcaatttgagattaggttggttagaggtaaggttgggaatagatttgacaaacatgtgatgtaatttctgccccttgccaatcctttttccattgcagccgtcactaattgattaaagtagtaatgcttactaaacccagatgtgaatataagataactttcaatacatcactctaaataggcacagcctgttgaccagaaccagtactaatgatggagcccacagccatctgtcgtgggagggagagcttggtttgatgaagggatagatttaaggtgatgtttaggtttgcttcgggattatggccagtttaagtttgttttgattttaggataagcttagtcaaggaaaactcttgactctggcttagaagcaagattaattttgagtttcgagtatgaatggtttagtactatgtttagtttgttaatttatagttaaggttaggctggattcagagtgatgctcagatttgtgtttcgtctaacttggaggtcagggttgtgttcagaattagattgagtgaattaggagaactcaatattcagcccttaaaacttccacttttttaactgtcctgtggtgttaaaagtagcagcagtagtccaaaaagtattatacttggatgatatctctaatatgcatgcagacagataagcaactttggtaaattacttagcaattctgggaacatttttagcatttggaaagagcaatattaatggtactgcactgtgttttattttaaatgaaacttatgtaaagtgtttagccagtgtttgttagacaataggcagtcagtaaataataagtctctttatcttttttttttttgtgctggcatcttattgcttcataaaactgatgacaatggtagttacaatttattaagcatttactgtgagagacacaatgattttaagcctttgacacatattacagtcacacactgcataacaacattttggtcaatagcagatggcatatatgatggcagtcccataagattataatagagctgaaaagttcctgtcacttagtgatgttatagccattgtaaggtcatagtgcaatgcattgttcatgtgtttttggtgatataagaataaacacacctactatgctaccattcatataaaagtacaacatatacaattatgtacagtacataatacttgatagtgataataaatgatcatgttactggtttatgtatttattatactatacattttattattttagagtgtactcctattttaaaaaaatgttgattggtggctcacgcctgtaatccgagccctttaggaggccaggttgggcagatcacttgaggtcaggagttcaagaccagcctggccaacatagtgaaaccccgtctctactaaaaatacaaaaattagctgggcatggtggcatgcacctataatcccagctactcaggagtctgaggcaggagaatttttgaacccaagaggtgggggttgcagtgagccgagattacaccactgcattccagcctgggcgatggagtgagactatgtctaaaaaaaaaaaaaaaaaatgttgattgtaaaacagcctcaggcagatctttcaggtggtattccagaagaaggcattgttatcatagcagatgacagcttcaggtgtgtttttgcccctgaataccttctagtagggcaagatgtggaggtggaagacagtgttattaaatgatcctcaccctgtgtaggcctaggctaatgtatgtttcttagtttttaacaaaaaagtttaaaaagtaaaacaaaattaaaattttatagagtaagaatataaagaaagaaaatacttttgtacagctgtaaaaaagtatttgctttaattctaagggtatatacaaaaaaataaaaagcaaaaggatacaataacaaaccagaagataataaccggggtaattatccttagataaaacaaagcctactttaagaaaagcaggattatcagagataaaaatagacattttataatgatgagagggtcaatccactaggaatatgcaataattctaaattcatgtgtacctaattaacatagtttcaaaacttatcaagtagatatatggacaaccatagtggagctataattttctcagagctgacagaacaaacagataaaacgtcagtaaagatagagaagatctggttccaattgacgtaattttcataaatagatctgatttactgaattgaacaaaactagctgacttaattgaatactaatttagtgttgataaaatattttttaacaccacacatggactattaagtaaaattgattatattttggaaaagaactcaggtttcaccaaatttaaagcattaaaactgttcagcatatattctctgacagccatggaactgagaaacaaataacaaaaataaaattagaaatgcttaaatatttggatattaaacatttcatttctaaataacctgtgagtcaaaaataaattacagtaaaaattagatagcattttggacgataaaatcatgaaatatgaaaacattcggatgcagctaatgttgtgttagagggaaatgtatagtcccatatttttatatgcataaagaagagaagctagaaattgaccacctaagtattaatctcaagaagttagaaaatattaaacacaaagaatatgcaaagaatatgcaaacacaaagaaataaaataacaaaaatcaattaataatacaaaattaataaatgataaaacaaatatatgataaagacaaaaaaaccaaaatgttgattattagagaggctaaataaacatatagcaagactaatcagacaaaaattagagatggcaaaaattacaaaatgagaaaagagattaatatagattatataaatatcaaggatataatgtaaaattttacactgattcattaaaaaatgaagattaatgataaaaattccataaaaaacatgatttgtcaaatttgacctataacaagaaagagactatctgaatagtcatatgttaccaaatatattaaactgaaatttataatcctccctcacaaaaatctttaggtgcaaattactttgccagtgaaattttaaagaaatttatgtaagaaataatacaaatattatgcaaacttttaaaaaaattacaaataaaaaaatcaggatactattctttggtcagtgagtcccaaacaaggacattacacaaaaggaaacttataaaaacagtcacattatttattatattgatgacattaaagaaaaaatgtcaacatctcaatacatacagtaaaaacattggaaaaattcaagacctgatcattgtaaaattgtgaagatatctaaaaataaaaggaaatttactaaatctgataatatctatgaaaagtcacagagcaagcatcacataatatttaatagtgatatattaaaaattttctctgaagttggtaatgacctaaggatgaccactattgacatttctaatgaaaattatagtagaggacttatccaatgcagtaagtcaaggaaaaaaaaatgaaatgcgtaaagattgagtagaaagaaataaaactatcattttttgtaaatgacatgaatgtatatgtagaaaatttatatatactataaaattaataggggaaatttgcatggctcagtaagttaacatgaaaatgaattttatttctattatgaacaagcaagatataaaaaatgatgttattatttaaaatgccatcaaacttctcaattacctaagaataaattgaaaatggcacaagatgtatgcacaaaaaaccattaaacgttgttgagaaaaattaagatataaaaatcctgagggatatagcatgttcataccttgaaagattcaatattgtaaagatgccaaccctcttcaaatcattgaatgattcaatgtgatccctttcaaatatcagcaggttttttgtgtatatctacttgtgtgtgtattgtatgtgtgtatccatgcagacataacatgtttacctggaaatataaaggacccataattgccaagatgatttttaagaagagcaaaattggaggacttgcgcttatgatatcatttattttgaatgagtgatatcagcaatatctcagaataggactttccaacacttgtctccttagagaaacatcaatctgaacacctatgcaagcacaaaagtatcttcagaagagttaagaaatctaggtgagagattatggcatctgagtggagcacagaagtaagaaaagatgcattgaaaacggtagaaaggacagttttacattacttgcatcaccactcccccaagccaaggcagtgcaatgtggagagagatttcctgtatatgagagaaggagaatgcagtcagcacctgatttcacagtggacaccagcactagacccatttcagtgaacttcagtgccaagctagcctatatggctccagtttccaggttcagccctgcagacccaggcaccaggcctaggcctaagggcccacgtgctcgacctactccagtgaacactggcctcaagccaacccctatgaacacaggaccaagaacattctcatgaacaaagtacaagcctgccccagcatcatttagttcctatggactcaggctcaaggccaatccaatgttggctctcacatacccaagcttcagtctaggccttgtggacgcagactccaggcctgtccagtagactcagttcacccctgtggaccttggcaccaagccgatctccgcagacccaggatccaggtccatccttgcctaagcatgaggtttatgttttaactccaattgctctaaccccagtggatccaggctccaggattgctttcatgtactcaggcaccagttcagcccctgtgggtccagatgtcaggccagcccacctgctgaccaagacaccaggtcagcctacccaggaactctaagcaataaggctgactgtactctgccaccagatggcctgcacagaatctctggataggttgactggtaaagggatttccttgccaaagccagtctgtaaagaatgtaagaggcgcctgcttcaaatgcacagacaccaatgcaaggccacagggatcattagtaatcagtgaaatacggcaccactaaaggaacgaaataaagcaagagtaagtgactcaaaggaatggagatggaggagctgcctgacaaaaaattaaaaataatgatcttaagcaaattcagtgagctacaagagaacacagacagctgaacaaaattaagaaatacatttacaaaatgagaagttcaacacagaggtagaaattataaaaaagaactaagcagaaattctggagctgaagaatacaatgactaaaccgaaaaattccatagacagcttcgatagtagacttgctcaagcaaaataaagaattagtgagcttgaagatagatcatttgaaattaaccagttaccaattactcaaattcagaatattgaagagaatctaaaaggaaagataatgagaaagagtgaagaaagcctgtggaacttctcaaacaccatcaagcaaactgatatatgcagtatgggtgtcctagaaggggcagagaaagaaaaagaagcagaaagcttatctaaagaaatgatgacagaaactttccaaatctggagaggaaaatgaatgctcaaatttatgaatcccaaataacctcaaatacattaaacataaagaggtttcactaagatacattataatcatattctcaaaagtaaaaggcaaagagaattttaaaagcagcaagaagaaagtttccttaggtgcaaggaaacctttttggttttttagagatggattcttgttaggttgctcatgctggaatgcagtggctattcacaggtgtgattccactactgatcagcatgggaattttgacctgctctatttccaacctgggccagttcactcctctttaggcaacctggtggtcccccacttccaggaggtcaccatattgatgccgtacttagtgcagacacctaattggcatatcatataacaccccagaactcctttgctcaagcgatcctcctacctcagcctcttgagtagctggaactacgggcatgcaccaccatgcctagcacatacaagggaacttttgcaagactatcagtggatttctcagcagaaactttgatggccaggagacagtgggataatatatgcaaagtgcttaaagaaaaaacctgccagctaagaatactatatctgaaaggctgtccttcagaaatgaagcaaaataaagacttctccagaaaaacaaaagctgtgggaattcgtagccactagattttccttacaagaaacactgaatggaattcttcaagtcgaaacaaaaggacataactaatgacataaaatatgtgaaagtggctgggcgtggtggctccctgtaacccccagcactttgggaggctgaggtgggtagattacaaggtcaggagatcgagaccatcctggctaacatggtgaaaccccgtctctacacacctagccaggcgtggtggcacacgcctgtagtcccagctactggagaggctgaagcaggagaatcacttgaacctgggaggcggaggttacagtgagccaagattgcaccaccatactccagcctgggtgacagagcgagactctgtctcaaaaaaaaaaaaataaataaatgaaaaaaataaataacaaaacaaaaacaagatgtgatagtacaaaactcactgtaaatataagaaaatagtcaaattcagaatactctaatattgtaatggtggtgtgaaagtcattttgaattctatataaagcttacaagatgaaagtattaaaacaactaaagctataataatttgttaatggatacacaatatacaaatgatataatttatagcaccaataacaaaatgtcagaggagggaagttaaaatgtagaatttttgtacgtggtcaaagttaagtacttaaacagcttaaaatagactgttataactgtaagatattttttgttagactcatggtaatcacatagaaaaaacatgtagtagataaacaaaaaaatgaagagaaaggaatcaaaatataccactacaaaaaaatcccatcataaaggaagaccaccagggaggaagaatgaaacaaagaaactacaaaacagtcagaaaataattaaaaatggcagtagccagtccttaacctgtcaataattcctttaaatataaatggattaaattctccaacaaaagacatagagttgataagttgatgaaacccacaatccaactatatgataagagactcattttagctgtaaagacacacataggctaaaagtgaagggatggaaaaagatatcccatgcaaatagtaaccaaatgagagcagggttggctacacttacatcagacgaaatacactttaagtgaaaattgtcataagagaccaaaaaggtcattatgtaatagtaaggggtttaatatatcaagaggatataacaactgtaaaaatatgtgcacaagcaatagagctcttaaatatataaagcaaatattaacagctgaaactagaaatatacagcaatacaataataataagaggcttcaatactccactttcaaaaattgatagattattcagacagaacatcaataggaaaacagtggacttgaacatgatagaccaaatggacctaacagacatatagcatattctgttcaacagtagcagaatacacaatcttttcaagaacacatggaacattctccaggacagatcatacattaggccacaaaacaaatcttaacaagttttagaagattgaaattatagcaagtgtcttttctgactacagtggaatagaactagaaatcattaacggaggaaaattggaaaatttagaaatatgtagaaattaagtaatgcattaatttccaaacaactaataggtcaaagaagaaaagtatctcaagccaaatgaaaatagaaacatatcatactaaaatatatgggatgcaacaaaagcagtcctaaaagtttatagcagtaaagtcttacattaagataaaagaaaaatctcaaataaattatgtaattttacacctcaaggaactagataaagaagagcaaactaagccgaaggttaacacgaaaagaaagcaataaaaattagagtagacataaatggagactagaaaaacaataagaccaacaaaaataaaagtttgttttttgaatgcgataaaatagacaagtcttaagctaatcataactaagaataaaagagataaaacaaataaataaaattataagtggaagagaagacataactgataccacagaaatacaaatgattgtgacactatttccagtaattacatgctaacaaactggcaaacctaaaagtagtgggtacattcctagaaacatacaaccttctgagatttgataatgaagaaatagaaaatctaaatagaccaataacaagtgacatggtttggctgtgtccccatccaaatctcatcttgaattgtcattcccataatccccacgtgttgtgggagagacccagtgggaggtaatttaatcatgggggcagttaccttcatgctattctcatgatagtgagtgagttcttgcaagatctgatggttttagaagggcttttcccccttctgctcggcacttctccttgctgcctccatgtgaaggatgtgtttgcttcctcttctgtcatgattgttaagtttcctaaggcctccccagccatgcggaactgtgaatcaattaaacctctttcctttataaattactcagtcggaggtacgtctattagcagtgtgagaagggacaaatacaacgagtaacaagattgaatcagtaataaaaaatctcccaacaaaggcaagcttgggacccaatgactttactgatgaattccatcaaacacttaaagagaaactaatgccaatcgttttcaaactcttccaaaatgttgaagaggaggaaacacttccatacttactctatgaggccaatattactctgatatccaaaccagacaagaatgctttaagaaaataaattacaagccaatatttctgatgaacataggtgcaagaattctcaacaacatattagcaaactgaactcaacagcccattaaaaacatcacacaccatgatcaagtgagatttatcagtaggttgcaaggatggcttaacatatgtaactcagtacatgtgatacatcatgttaacaaaatgaaggacaaaaaccacaatatcttcttaatagatgcggagaaagcatttaacaaaattaatcatccattcatgataaaaactctcaaaaaataagtatagagagaatgtacctcaacctaattattttgataaacccatagctaacatcatattcagcagtgaaaacctgaaagcttttcctctaagatcaggaacaagacaggaatgctcattcttatcacttctattcaatataatactgaaattcctagacagagcaattaggtaagacaaaaaaaaggcatccagcctggaatggtgtctacactaagcttggcatcaatatggtgaccttctggaagtggagtaccaccaggttgcctaaggaggggtgaactgacccgggttggaaatcgagcaggtcataactcccatgctgatcagtagtagaatcactgcactgttcctttttgcaggtgacataattttatatatcaaaaatcctaaacacttcatcaaaaaacttttagaactaataaagtcagtaaatttgcaggacacaaaatcaaagtgcaaaatcagtagcatttctatacactgacagtgaactatcagaacaagaaatcaagaaaattatctcttgtacaatagcatcaaaaaattaaatacttaagaataaacttaaacaaggaagtgaaatatctttacactgaaaattataaaacattgatgaaagtatagaagaataagtggcaatatgtcccacattcatggtttgaaaaaagtaatatcattaaaatgttcgtactacacaaaactatctacagattcaatgtaatccctatcaaaattacaatgacattttcacaaacattagaaaaaaatcctaaaattcatatagaactacaaaagaccctgagtagccaaagcaatcttgaataaaaataacaaaggtggaggcatcactacctgatttcaaaatctactatgaagttatagcaatataaaaagcactgacaaaaaaaacaaacatgtggaccaacggaagagaacagagagcccagaaataaatccagacatttacagtcaattggtcttttacaaagatgctgaaaaccaccaatgggagaaatgacagcctcttcaataaatagtgttggcaaaactagatgtgttagttcattttgcattgctataaaggaatacctaagactgggtaatttataaagaaaaaggcttacttaggtcattattctgcaggctgtacaggcatggtgccagtatcttcttgacttctgtgagatctcaggaagttttaactcatgatagaaggcataaggggagcaggcatgtcacagtgaaagagcaagagagagaggggagaggttccagagtctttctaacaaccagattttgcatgaactcattaccatgggagagcaccaagtcattcatgagggatttacccctcatgatctgaacacctctcactaagccccacttccaacattgcaaatcacatttaaacatgaggtttggaggggactaacatccaaaccatattgctagatatccacatgcaagagaatggaattgaacccttatcttaaaccatataaaaatcaactcaaaatggatgaaaggcttaaataaaagacctgaaactgtaaaactacacatagaaaacacaggtaaaagcattttgatattggactgggcaatgattttttggatatgatcacaaaagcacaggcaatgaaagcaaaaataggcattgcatcaaactaaaatttttctgcacaacaaaggaaacaatcagcagagtgaagagataacctacagaattggaaaaatatctgcaaaccatacatctgatcaggggatcatatccaagatatgtaagaaactacaacaacttaacagaaaggaaacaaagaacccaatttaagtgtgggtgaaggacccaaatagacatttttcaaaaaaagaaatacaaatggccaaaatgttcatgaaaaaaagtccagcatcactaatctttagagatatgcaaatcaaaaacacaacgagaaatcacctcacacctgttaaaatagctataatcaaaaagagaaaagacaaaagttggcaagaccgtggaggaaaagggaacatatactgtttgatgggaatgtgaattagcacagtcattatggaaaacatgaatgtttctcaaaaaattaaaaataaaactaccatatcatcccatagtctcacttctgggtatatatctaaaggcaatgaaattaatatctgaaaagatatctttaccctcatgaatattgtagcattatttgcaatagccaagaaatggaatcaacctaagtgtccatcaatggatgataaaaaatgaaaatgtgcagggtatgcgcacacacacacacacacacacacacacacacacactcatatacacgatgaaatattcagctttaaaaagaaaatatttgtgacaatatggatctggaaggcattatgctaagtgaaagaagctagccacagaaagaaatattgcatgatctcacttacatgtggactttacaaatgtcaaactcatagaaacagagtagaatggtaatttcgaggggttggatgttgaaggatatggggagacttggtcaaagggtacaaagtttcagtttggcagggtgaatatgttctggagatctactgtacagcatgataattctagttaacaatactgtactgtatgttaaatttgctgagagaatagatcataaatattctatcacatacacatgcacacacgataactatgtcaggtgatggatatgttaattagcttgattgtggtaattatttcaaaatgtatacataatatatagcatgaaagcatcatgttgtatgccataaatatatacctttttttatcaattatacctcgagactggaagaaagggaaaaatatttatttcaaagttgtaataattaatacagtatgatattggcacaagacaaaatatgcatggaacaaatagagaaccagaaatagatccaaacgtgtgtatccacttggcttgtgacaatggtgacaccgcattgcagtgcagagaggtcattccttcaataagaggaagtcatattgggtcgattggatagtcacatggaaaaaaacgaatctggagctgtatcacacatcctacacaaaaataaattccagatacattatagttttaaatgtaaacagtaaaaacaacaaaatgttgtaaagataaatttgggaatattttcattactttagagtagtttaatatttcccaggaaagatacaatactgcccataaaaagattgttaagttgatcttaattaaaattaagaatttgtatttatcaaaatacaccattaggagaataaaaatgcaagcaacagagtgggaggtatttaagatacatttattcaacaaggggatattatccacaaaatatttaggaagtgtttctacaaatctgtaacaacccaattggagatgggcttaaaacctgaataggctcttcacaaaagaggataaaaatagccgataagcatatgaaacaattttaacctcattagtaattagtaaaatgcaaattgaagtcacaataaggtgccaagtgttggtaagaatgtatttagaactttcatactcttgccttatgcaatgaatccctcaatcataatactgaatgaaagcaaacacaaagatatcttttacatgaagttttaaaacaggtaaaactaatggtggaatatgtaaaaatggctgttaatttttatagagagcttgagagagaacacaaagaagcttcaggggtgctggctatattttgtttcttgatctggatagtaattacatgggtttatataatttttttttgcatggtcacatttttacatgcttgctattctatattaagcgttcatttaaaataaaatcactggcccggtatggtggctcatgcctgtaatcctagcactttggaagcccaagatgggcagatcacctgaggtcaggagtttgagaccagcctggccaacatggcaaaacctcttctctactaaaaatacaaaaattaaccaggtgtggtggcacacacctgtagtcccagctacttgggaggctgaggcaggaaaatagcttaaacccgggaggcagaggttgcagtgagtggagatcacgccactgtactctagcttgggcgacagagtgagactctgtctcaaaaaaacaaaaaatatatatgtatatataattaaatcactattaagaacttcagacagttgttgggagaaaactgccttagtcttccaaagctcaggtttttgcctagtatgtgtaatccaggggacatccaacagtgtgtctggggagggacagtcttgtccccagatctgtcaacattttttcattataacaaagcccatatgactcatgtataaaactctgaatgcaatgttcttggaaatatgacaaggtccaactgcctagttctcccaagcagcagcattacttgtgtatgtgagagagggatgaggaagtggggaggagggagattctgtttgccaatctagaccagtgttcctccaacttttttgaaatagagtttcactctttttgcccaggctgcagtgcagtgatgcaatcttggctcactgcaacctccacctcccaggttcaagtgattctcctgtctcagcctcccgagtagctgggattacaggtgcacaccactatgcctggctaaattttgtatttttactggagatagggtttcaccatgttggccaggctggtctcaaactcctggcctcaagagatctgcctgcctcggcctcccaaagtgctgggattgcaggcgtgagccactgtgcacaactttttagtatacagtgcagtcacatggagggtttgataagacaaatggagtggaaccactttcaaagtttctgattcagtaggttgagatgggcccccgaattttgcatctctacattcccaggtgatgctgatgagaatgctactggtatcatactttgagatcaactgatctagagcacttattgatgagcactttacggagacagcaaggtggcactggtggtggggtgatggtaactggatcataggtcagagattcagccattaggctcagattttattgttcacagcaggttctatgtaaagactctccttttcccagaactggatttcatgagtttattgcatgagtttttacaagagagttcaattacaatacaccaatgccttattcttgcacatggcaagtcaatatgggcaatatgttcattgaacatccttccccactcatgatctcattaggactttggcattttaaatagttcagcttgtaaacccagggccatctgtgcaggtgacctaatccatgtctctgatgataactagcacccatagtaaaatgaatgcaaactgatttcaatttctgtttaaaaaacaaacgaaaccttactttatacttggcattagcaccagtgttggaggcagggagtgtggtggaaatggggagggaacaaagaagcagcagatacagctgcctgctttcctgtcatgaggtttactttacagtacatcatgtgtctcaagaccagctgagtgttacattttccatccttaaatgacacttgctttgcacatgtatttcaaaggcttagagttgtttgcagaactctgtcccaaccacaggacttcccatcctgcagctggagagtcttacatgcagaagggcctgggactttccaagtgtggggtgtcatatctagcagctctcctttctcatctcttgggtttgacttgtcctgaactaccccttgctatagactagccacagtggcgtcatctgtttagtctggacactgctatcatctttggcaccccagtgctccctggtctgtttaccttaggcagtattgccagctaaagaattgctttcccctgctctcatatccatccacagtcaccaatagggttcgctttcccatagacctgctctatgttggtttttatcagctaagataatccaccttacgggctggcagcagaggccactggtgccctggctacatcctcaccttccagtgtgctctgactggtttccagttgcatctgcatctctgtgcctgaggattcccccatttcaaccctgaaccctgaaagattgctctgcctgtttgtacaacaggccagatgttccaggaagatcccttaatcaatggctttcaggcactgatatatgaatatcccagattatttgcttctaggctgatgtaattctggtatgattagcattatttcccagaattttcccatggtagctggcttaaaaacacatgtattggcttccttccaaggaatttttatatttgacagctatttactgagtgcctactgtttgccaggcactgtgctagatttgggatataaatgatgagtaaagcagatgtggatcttgtgatatcgtgggagaaacagataataaacaatcactcactcacaaatgtatcattttaaaattgtgataagtgccattaggactcacacaaagtatatgatgaaggaactgagtgtcttacctacatgatgcagtgactgggtaaggctgcattgaggaggtgatttgaactggaggcctagaggatgaaaatcagccatatgcagagctggggaataaaatgtgcagatattggaacgggaaataatttaggatgttcttggaatggaaggagagctgacagaagaggggacagtggtactcaggttggataggcaggtaggcaccagatcatccatggccttgtgaagcgcctaggtgggtggtatgtgtgggcatgtgtatatgtttctgtatgcgtgtgaatgctgtaacatatatgtgccttcttctctgtgtttgtgttcacccagtggtatgttagtgaatgggatgtgtttgcatcttgactatgtgtgtatctgtccgactgtgccactgcatgtgtgggtttttgtgtgtatgaaggcctgtatattgatgttttcaaatagacttttttgatatgtatctataagtatgtattaatatatttttactatggtgatatctaggtctgtaggcctaattatttatgagtatgtctataaagatatatagataaatgtgtcattgtgcatgaaagcatgcacactgatatgtatatttgagtgtaaatatatttgtattatggtattgtataggtgaatttataggtgcctgtatatgtgtgttttatgtgtatatgattaaactagaactagattgaacaatattctgaaattagtgtctgtgtctctgtatgaagctcaggaaatagtctttccctcaaccagaccacaaaaacttggaatttttatagctcacatttgctagcaagatgcaaactttacttgcagttacagttatggcttgctttattttacattttcaatattcctggcctttaagaatctgaattctaaatactttatgtgaatgagtgaatatgtgtgcatgtgtttaattctcttggtttcagtaagtcagcttcagttaggccaaaatccttacccttgtctttatgcgttaatatctttatttagaaatgaactttagacctggagtcgagtggttgcctcaggcagcttttttttttttctccattaatatcttagttgtaagatgatccagcagtttgattgtcggggaatcaaatacaaggaggccatccttgagccccatggatgttcttatagactgatgttgtcagagaaatggagacagcaacttccagggaaagacaatgagcagctagagtctgagctactatctccatatagagtaagtgggcccagtcctttgaatagattttccttcaattcccgattctggcagcacacaaaaaaagattgttgcctagtcatgggacacaggctttggcatgactatttttatccaggcaatatctcatgtttggtgctctatttattcttccaactagaattgtggtgtgtgatgatgcccttaaagatcatccattctagtctactttacaaactcttctttcatgggtggacattaggctgctccttcaacacctctgtggtagattgtgttgatgataggcccaattaatggcctctctgtatccatgctcattgtattttaactttgtagttccctcccactttgcctctgggattagttctgtgacttgctttggccaatacgatgttagcaaacttgatgcaagcagaagtgcgaaaaaacacctgtgagtttttacttcctctccctctcttttctgtgatcaccctaaaaataagcccacactagcctagtggaagatatgagaccacgtggagaagagctgagttaccccagctaaggccatcttggattagttatcctttagcaagcctaaaggctaaggatagatgcgtagtgtgagcacagccaaggtcaattcaactaacccatagattcaaaagagttaataaatggttgttactttaagccactcagtttggagatggtttgatatacagctgtagctaactgatataacctcaatggtagggtgcttattatcactggaggcagtccatttcattgtgtatcaattctaattgttatgcggtggagctggactctgcattataacttctgactatgccctgtgagtgtcagtggaaaaagctcgtatcttctcccacaatgaccttcaagtatttgatgatagtgatcatgccagatgactagagcagcttccaaactaaattatccacacagaagttatccttgttaaacaaactggattatgttataccttgctaaaaacctttccatagtttctcattacacttagattaaaacccaaacttctttccattgttctgcatcatccatatctgtttgtctcaacctcatcctgaaccactcttgcctttgctcatgatgctctcatcatatcgacattctttatgttgacagtgctaagctttttctcacttgatggtcttttctcatgctattccctcctgcctaggaataaatatgtgttgacattcctgaatcttctcttctctgaaccaaacatcttctgtgtctgccattattcttcaattgatataaatgtaggtcttctcactaatctgattgcatgctttagtgtcttgttgcctcattttgaatatgatacccagaaatgaccatacttcttgggcatgactacagcaagaaagttatcttgttctttctgaaagaagtctacatgcacccaaggtatcgtgccaccaggatagaaagaaccatgcacattcacttatgatggattggctaggtggataggatgacgaatgcttggaaaacagactatctggcttctaccaggtcaatggcaaagaccttgtagcctcctaatatataagaggttgatgtgtacacagattgacaggacagacaggaatagtcaccaaggatttgtcagtggtttcccttgagccttgccctagagatcagctcaatctagagtgggttggagtaagctattgtgtgtctattagcacagaggccaaagcccttctcagctcctcagttctatgtgaatctctcaccttcaatctcatcctgaaattagtttatctttaagtcatagataaatacaaagtctaacaataggctagtaaaagtcaagtaatagtaactcataattgtggagcatgtactctgacacaggttctttctaagcacttaatttgctttaaccaatcaaattcttaaaacaacccttttaggtagaactagattaaaccagttgtttcctaaccaactgcacagtagaatcaccagaggagtttgttgaaaaatggaaaaataaaaacaaagcaagaaaagattacctgactctacccaatattgtttgctaaatcacactttcttggggtggggtgggggcagggggccaagataatctgtgttttaaaaacagctctctgcttgctccttcagcaattaacctggcatctgtgagctggcatttgggaactaataaattatgtcagcctttcccatagtatgcctcacaagatgatcataggtggcatacagaacattttttaattagattttaataattacatatttatttttaaatatgtgcatgagaaaaaggtagcatattgaatctgtgtttttatagatattgctgaggaaaggcttaaagtgggtatttaagttaaaaaaaaaaagtgagttgatttagagaaaattaagtagtgaaacaggtatactgataaggttaacactcaaaggtggcaaatgaatggccaaagtttaggatactctgagaaaattctgagatccctttgattcagtgattctttcattctatgtggcatgtggctttgggtaaatatgcaactttgcatttgaatttgcttatatgaacactttatcagtagttttcaaactttcagtagcagaactttttcaaatggaatctctcttacccctgaactccccaagctatctcaccccaagatttccttcagtctcagctcctgaaacctgacctaaattaaatcctagctcttgtcttacacaaggaaatggaagcaagggctaacattgatgcagctttgccattcaaaatgtgctcgacagtaaatcagctttctaagggcatgagcgcagatttgcattttggatgttgaaatgaaatgaagatgacctgtagaaagacaggaattggagttcaggtggggataggatgggcctagaagactttattctctttctaatagcaattcacctctttttcttccaaccttagtcatgcgcttctagttctacctttatcagcagtgagatttcctcaacttccttaatctcagtatgattccacctataaataaacattattatgggggccagctcatagggttgctgtgtgtattaaataatatatattcttacctccaggtctggcatatggtgtttgctaagtactagttactaccatctccaaagtcattttagcatcaaagataaatgcatgttaattgtttaacctccagtaaatataatttaaaacaagtaaaatataatcaattatctatttcatgtatagctttgagtgtttcatttttttgaatacaaaaatgtatatgaccttcaatgggtttaataatattcttactttccttaactccttaaccttatttgcctcatgaggcattcagttctgtcatgaaatctctgaccacagatatatttcaggaggccaatcttagcacttggagaaagcttcttttaaaattcatcacgtttattgagcaattttccattctctcacaaagctccctactacttaatctcacttgagcaagaaaatattcctgtgaagtgggtagggctgaacttattcccattttacagatgattaaactgaataagctttggaaccatctcctttggaagcaaagtaactcactatggtctaaacactttgagaaaagagagaagaaaattgagatgaattcatgctttgcctcaattccctgtatctttcatgttaaattaccttgcttcatgttattgctgcaaatttggctttgttagtgcagacctgacctggatctgtctatatttctgcatagagagatgaccttaatgtatttgcagaatctacatgctgtccactaaaggccacccagcaaatgcaaatgtagcaaatggaaaatgcatttcaggtgcaggtcaaaaactgtcccagcaagaaaaataactgcaatgacggggactctggctgtccagataccttctgaaagtctctttgaattaaaagcagagcgtctgacaatttcatgactaccccatctgaaaatgcagtcttccctgaggtggagggggtgatctaggtcactgacttgccctgccagaatcttaccaacaaaaaggtatcagttgactgagtggaagtgacagggactttgggaaaggtgacagagtgagaagttaggaactgggcacagttagaagacaggaatatggattgcaaacaagtgaaagaaaaaacacagctcaaatttgtagggtggtgcttcaaaaagtagtgtgactatgactggaaatctcctcaaagtgccgttctgcctgtgcatattttcccagtgacaaaggtcatggagtggtaaccagagaaatccatgcagtgagccagggaactctgtgatgaaagtgaatgcaaaaatggcacctgagagatggaaagaaggactcagaattaagaacaaaatagaagaggtggaagggaccaagaagactgtgtcgtggcagggggtaaagctcacccctatgctgagggttaaaatatgttaaggaaagaaaaacaaacaagcttctaaaaatcatccgggtccagtgtggtgactcacacctgtaatcccagcactttgggaggccaaggtggtaggatcacttgagcccaggagcttgagaccagcctgggccgtataacgagaccctgtctctatgaaaaatataaaaaaagctgggcatggtggtacatgcctctagttccagctgctaaggaggtcgaggctgcagtgggccaagattgcaccactgcactccaggcctggggaacagagtgagaccgtgtctcaaaaaataaataaaatgaaagtcatgtgtcagagaagcagatctagatctagatcctagatctctgaaggaataaataggttttctggtactgaggagggagctggaaaaagagaatttaagcctgaaaagtgtggagggggctttaatgagggagaggaggtacaacctctcaataggaggaagaactagacgagagaatcttacttctcttgcgagctcacttctcatagtctcctcaggttctgagaggacttagggttgggatccttgagtatcgctaacgaactgacagaattgatggagaagaggtgagagtggtagaagatgggagaaaaatgtcatcccaaatttcaacagaggaggaacatagcttccatgaaccactaggtgagtagtttgctgtagatccaaaaggaggttatggaatggattattaaaggagtttgtttgtgaacacatggagaaggaaataataatcacagggactcagcatgtgttttcccagaagtcatatcaggtcaatctcatttttccttttaccccattatgtaatgacagacagattaaggaagtgagactgttgctaggatctaggagatcagctagacatttgacaaagtatcacataaaacctttttggacaacatggataaatataggtaagaagacaaatagtaatagttatagtaataataataataataataataacaacaacaacaaacacttactgagtttttactatgttagaccatgtcaggattttggtattctttgaactatcaatcacaaaataggctgctgtcaactagaagagaggtctccagtggtgaacccagcattgtgtgtttttgatcctattcaggtcagcacattgattcctccctcttctaataccttggccttatccatggtttcaatttggttgatgaacatttattgccaatcgaaaatagtcaactcccacggtactcttggcactcgggtacagttgagtgctagaggtaggctgataggttcaaataaccagtttggttatttaccgtctatgtgaccttagtcaagttactcattgatatggttaggttttgtgttcccacccaaatcttatctttaattgtaacccccatactccccatgtatcaaggaagagaacaggtggaggtaattgaatgatgggggtagttcccccatgctgttttcatgatagtgagtgatttctcacgagatctgatggttttataaggggctcttccctcttcgctcagcactcctttccctgctgccttcaccttctaccatgattataagtttcctgaggccttcccagccatgcagaactgtgagtcaattaaaccactttcctttgtaaattacccagcttcacgtatttccttacagcagtgtgagaatgtactaatacactcactgtctccattttttcatttccctatctgtatgatgtgtgaagatattagagatgttatgaaaattaaaggagacaacaaaagggaagtaagtgcctgacaagggtaagtgtgacaactggcatggtgtttgcctttttggaaaaatataatataacctggaggttgatcacctgcagagaatacagaggacaatgaatgacaaatggctgggagggagggaaaacaaacacaatggggacagtcagaaatgaacaaagagcttgacaggaaggaatggtgggctgaatccagtatgatagaaagtaccaggagaccagcctgaccaacatggagaaaccctgtctctactaaaaaagaatacaaaattagccgggtgtggtggcatatgccggtaatcccagctatttggaagactgaggcaggagaatcacttgaacctgggaggcggaggttgaggtgagctgagatggcgccatttcactccagcctgggcaacaagagcgaaactccatctcaaaaaaactaccaggaataaatgtttagctaaaaaattccttccatttcaaagtagaatatgggagattggttaagcagttactcagataaagaggattgtgatttcagaagatggcacagtttgagtcaaaaatgagaaattcccctggccaaaatgtggtaatgagatttcaggttatattaatagaagtatggtatcttcactgtggaggtgctggtcctctctggggcaccaatcatcccatagctagagtattgtgtttgggttttagtaacattacaaatatgggtggggttatcatctgtccaaatcagttctctggtgtcagttatttaatggtttcccatcacacttaaaaatcatatccaggctgggcgcagtggctcacgcctgttatctcagtgctttgagaggccgaggcgggtggatcacgaggtcaggagatcgagaccatcctggctaacagggtgaagccccgtctctactaaaaatacaaaaaaaattagccgggtatggtggcgggcacctgtagtcccagctactcgggaggctgaggcaggagaatggtgtgaatccgggaggcggagcttgcagtgagtggagatcgcgccactgcactccagcctgggtgacagagcgagactccatctcaaaaaaaaaaaaaaaaaaaaaaaatcatatccaaaatcctttccatggtctacaaggtgcttttagtctctctcctccccatcccccatctgctacctcatttcttactacttcatccattagcttctgttgctgatcttcaagcaggctaagtgtgttctcatctgaaggctttctcacttactgtctcctctacctaaacacattttccccagaaagttctttggcttgatccttcacttaattcaggtctctgttcaatgctaccttctcaaaaagagacatttctaatactttatctaaaaaatgactcaatcactgtttcttcatgctgtttcatttttaaacaaaacggtattctagacggcagggtactccaacagacctgcagctgagggtcctctctgttagaaggaaaactaacaaacagaaaggacatccacaccaaaaacccatctgtacatcaccatcatcaaagaccaaaagtagataaaaaccacaaagatggggaaaaaacagaacagaaaaactggaaactctcaaaagcagagcgcctctcctcctccaagggaagcagttcctcaccagcaacggaacaaagctggatggagaatgactttgacgagctgagagaagaaggcttcagacgatcaaattactctgagctatgggaggacattcaaaccaaaggcgaagaagttgaaaactttgaaaaaaatttagaagaatgtataactagaataaccaatacagagaagtgcttaaaggagctgatggagctgaaaaccaaggctcgagaactacgtgaagaatgcagaagcctcaggagccgatgcgatcaactggaagaaagggtatcagcgatagaagatgaaatgaatgaaatgaagcgagaagggaagtctagagaaaaaagaataaaaagaaatgagcaaagcctccaagaaatatgggactatgtgaaaagaccaaatctacgtctgattggtgtacctgaaagtgatggggagaatggaaccaagttggaaaacactctgcaggatattatccaggagaacttccccaatctagcaaggcaggccaacgttcagattcaggaaatacagagaacgccacaaagatactcctcgagaagagcaactccaagacacataattgtcagattcaccaaagttgaaatgaaggaaaaaatgttaagggcagccagagagaaaggtcgggttaccctcaaagggaagcccatcagactaacagcggatctctcggcagaaaccctacaagccagaagagagtgggggccaatattcaacactcttaaagaaaagaattttcaacccagaatttcatatccagccaaactaagcttcataagtgaaggagaaataaaatactttacagacaagcaaatgctgagagattttgtcaccaccaggtctgccttacaagagctcctgaaggaagcactaaacatggaaaggaacaactggtaccagccgctgcaaaatcatgccaaaatgtaaagaccatggagactaggaagaaactgcatcaactaacgagcaaaataaccagctaacatcataatgacaggatcaaattcacacataacaatattaactttaaatgtaaatggactgaatgctccaattaaaagacacagactggcaaattggataaagagtcaagacccatcagtgtgctgtattcaggaaacccatctcacgtgcagagacacacataggctcaaaataaaaggatggaggaagatctaccaagccaatgggaaacaaaaaaaggcaggggttgcaatcctagtctctgataaaacagactttaaaccaacaaagatcaaaagagacaaagaaggacattacataatggtaaagggatcaattcaacaagaagagctaactatcctaaatatatatgcacccaatacaggagcaccaagattcataaagcaagtcctgagtgacctacaaagagacttagactcccacacattaataatgggagactttaacaccccactgtcaacattagacagatcaacgagacagaaagtcaacaaggatacccaggaattgaactcagctctgcaccaagcagacctaatagacatctacagaactctccaccccaaatcaacggaatatacatttttttcagcaccacaccacacctattccaaaattgaccacatactgggaagtaaagctctcctcagcaaatgtaaaagaacagaaattataacaaactatctctcagaccacagtgcaatcaaactagaactcaggattaagaatctcactcaaaaccgctcaactacatggaaactgaacaacctgctcctgaatgactactgggtacataacgaaatgaaggcagaaataaagatgttctttgaaaccaacgagaacaaagacacaacataccagaatctctgggacgcattcaaagcagtgtgtagagggaaatttatagcactaaatgcccacaagagaaagcaggaaagatccaaaattgacaccctaacatcacaattgaaagaactagaaaagcaagagcaaacacattcaaaagctagcagaaggcaagaaataactaaaatcagagcagaactgaaggaaatagagacacaaaaaacccttcaaaaaattaatgaatccaggagctggttttttgaaaggatcaacaaaattgatagaccgctagcaagactaataaagaaaaaaagagagaagaatcaaatagatgcaataaaaaatgataaaggggatatcaccaccgatcccacagaaatacaaactaccatcagggaatactacaaacacctctacgcaaataaactagaaaatctaaaagaaatggataaattcctggacacatacactctcccaagactaaaccaggaagaagttgaatctctgaatagaccaataacaggagctgaaattgtggcaataatcaatagcttaccaaccaaaaagagtccaggaccagatggattcacagccgaattctaccagaggtacaaggaggaactggtaccattccttctgaaactattccaatcaatagaaaaagagggaatcctccctaactcattttatgaggccagcatcattctgataccaaagccaggcagagacacaaccaaaaaagagaattttagaccaatatccttgatgaatattgatgcaaaaatcctcaataaaatactggcaaaccaaatccagcagcacatcaaaaagcttatccaccatgatcaagtgggcttcatccctgggatgcaaggctggttcaatatatgcaaatcaataaatgtaatccagcatataaacagagccaaagacaaaaaccacatgattatctcaatagatgcagaaaaagcctttgacaaaattcaacaacccttcatgctaaaaactctcaataaattaggtattgatgggacgtatttcaaaataataagagctatctatgacaaacccacagccaatatcatactgaaggggcaaaaactggaagcattccctttgaaaactggcacaagacagggatgccctctctcaccactcctattcaacatagtgttggaagttctggccagggcaattaggcaggaggaggaaataaagggtattcaattaggaaaagaggaagtcaaattgtccctgtttgcagatgacatgattgtatatctagaaaaccccattgtctcagcccaaaatctccttaagctgataagcaacttcagcaaagtctcaggatacaaaatcaatgtacaaaaatcataagcattcttatacaccaacaacagacaaacagagagccaaatcatgagtgaactcccattcacaaatgcttcaaagagaataaaatacctaggaatccaacttacaagggatgtgaaggacctcttcaaggagaactacaaaccactgctcaaggaaataaaagaggatacaaacaaatggaagaacattccatgctcatgggtaggaagaatcaatatcgtgaaaatggccatactgcccaaggtaatttacagattcaatgccatccccatcaagctaccaatgactttcttcacagaattggaaaaaactactttaaagttcatatggaaccaaaaaagagcccgcatcgccaagtcaatcctcagccaaaagaacaaagctggaggcatcacactacctgacttcaaactatactacaaggctacagtaaccaaaacagcatggtactggtaccaaaacagagagatagatcaatggaacagaacagagccctcagaaataatgctgcatatctacaactatctgatctttgacaaacctgagaaaaacaagcaatggggaaagcattccctatttaataaatggtgctgggaaaactggctagccatatgtagaaagctgaaactggatcccttccttacaccttatacaaaaatcaattcaagatggattaaagacttaaatgttagacctaaaaccataaaaaccctagaagaaaacctaggcattaccattcaggacataggcatgggcaaggacttcatgactaaaacaccaaaagcaatggcaacaaaagacaaaattgacaaatgggatctaattaaactaaagagcttctgcacagcaaaagaaactaccatcagagtgaacaggcaacctacaaaatgggagaaaattttcgcaacctactcatctgacaaagggctaatatccagaatctacaatgaactcaaacaaatttacaagaaaaaaacaaccccatcaaaaagtgggcgaaggacatgaacagacacttcagaagaagacatttatgcagccaaaaaacacatgaaaaaatgctcatcatcactggccatcagagaaatgcaaatcaaaaccacaatgagataccatctcacaccagttagaatggcaatcgttaaaaagtcaggaaacaacaggtgctggagaggatgtggagaaataggaacacttttacactgttggtgggactgtaaactagttcaaccatgtggaagtcggtgtggcgactcctcagggatctagaactggaaataccatttgacccagccatcccattactgggtatatacccaaaggactataaatcatgctgctataaagacacatgcacccatatgtttattgcggcattattcacaatagcaaagactcggaaccaacccaaatgtccaacaatgatagactggattaagaaaatgtggcacatatacaccatggaatactatgcagccataaaaaatgatgagttcatgtcctttgtagggacatggatgaaattggaaatcatcattctcagtaaactatcgcaagaacaaaaaaccaaacaccgcatattctcactcataggtgggaactgaacaatgagatcacatggacacaggaaggggaatatcacactctggggactgttgtggggtggtgggaggggggagggatagcactgggagatatacctaatgctagatgacgagttagtgggtgcagcgcaccagcatggtacatgtatacatatgtaactaacctgcacaatgtgcacatgtaccctaaaacttaaaagtataataaaaaaaaagttgtatttagatatcattactgctttaatacctaaaaaaaaaaaaaaaaacaacggtattctacatatctatgtgtcttttattatctggttccctcattagaggaggcactatgaagggtagggacttaactgttccggtcacagtctagcacagtatctggtacaaggaaggctcatagtaggtgctcagtgaaaaaattgttgaacgatgaatgaataattaaataaatgaatgaattaataaacactctgtagaactcacatttcatagaagacattttggcaaaagttatatgaagtttttaacttgtctattctggaaataaggcagaagaaaaagtagggaagtagcaaagatatgggacatttgtctaaattttgtaatggctatagtttttaatctcttttttttaagatggaatctcgctctgtcacccaggctggagtgcaggggtgcgatctcagctcactgcaacctctgcctcctgggttcaagtgattcttctgcctcagcctctcaagtagctaggattacaggcgtacaccaccacgcctggctaattttttgtatttttagtagagacggggtttcaccatgttacccaggatggtctcaaactcctgaccttgtgattccctgtcttaagatattcctaaaattcctccttcttaggagttctctttccttggaacctagagataagtcgtcctcttatctttgggacacttctaggatgaagacactcttatgtgatgttgctcactttcctgcacctcctctgagccctgaccccataaggctgattgtcccccacatccccttctctctgttctttggggttcttcaggattgcatttactatctggttgtcctttgggagaagtggcagattattgtctatccacccttgcatatatgtctcccagttttacaatgccaataaatttcttaaatacattttaaaatacaactcttttattgtaagaattatggctgtcttgtgtgtgtgtgtgtgtgtgtgtgtatgtgtgcgtgtgtgcacacgcacatgtgtttatctcacagcatttaacacaaagcctggactgtaacaagaactgagaatatatttgaaggttttaagaatggtttgagaagactttttggttaaaaaggtaattcagatatacagaagtgttttttttttttttttgagacacccattcacaaatgtgcctttcttccagaggcattcatttattcatccatccgttcatttaacacatatttactgcatgtccctatgtgctttcatgccctggtctcagcacatcctgacttgagccctgccctcacacagtttcttcacatcagcttggcaagaaaaaggggcaattcttgaagaatcacatgttttactcattgttccattgaacactgctcagagaaagtgtgattagaattatggagaaggggtaactgaactgagcaagtattaagtgtctcctcttctaatccctggacctcatccatggtttcaatttggttgatgaacatttattgccaatcaaaaatagtcaacttccacagtgctcttggcactcagggttagagttgagtgctagaggtagactgatggattcaaatcccagtttgtctatttaccgtcctgtgacctaagtcgagttattcacgttctccagtttttcatttctctatctatgctctgttacccccaccctccaatctttgggtctagcaacaccccccttgaggctttttctaatgctcaatgaacaacagaatttcatgccctgacccaactctcccctgctcaaaattaacttaaataataaacaatcaaaaatcatagaccatgagaaaacaagaagtgggaagatgttagagatgttatgaaaattaaaggggataacatatgggaagtgcctgacaagaataagtgtgacaattggcatggctcttgtctgtttggaacaatataatataacctggaggttagtcagctgcaggtaggagataattttgaatagaaaaaaatcttcaatgtatagtaaatttactttttcatagtcctaagtataaaggcactcagatgaagggtattgagaactctttctccaccatcaaaacccacaagatctgctatcattttaaccagtgtgtttgtgtgtgtgtgtgcatgtgtgtgtgtgtagaggaggaggacagtactttcttaacctcctcattcttcaaagtctttatccaattaatccagaaggtatgttgcttctatatagcaggcacatgttggaaaccaagtctcaagaattggaaggaattcctacatactcagtaattccttctcttccttcctttcttccctccttctttcctcctttcctttgtctctccctttctcccttctctcattatttaattaatggttaatggataacaacttggcagcaggcatctttactgtcctccttgggctcttacgttcatacatgtgggtcatggattatctaaaacagcgtccacaggagtgctgcctttttccatatgaccgaatcccttgccatcacctcttgctcagcacctcagccctttcagatgtgcaaccctactttgaatttctatcctttgggaaagaggaaccattatggattttaagcagaggagttatttctgaagattaactggggaaggaaagaggactaagacaggaggcaggaagagagaccagtccaagtttctaatcctagttctttccctacacaggtgtgtagccttggagaagttacttaaccttacaactttatttacttatctttaaaatggggggtaagaaaccccatctcacaaaattattacctgagttcagtgcgaaaacaagaaggtgattttggtgcctagtatgaatggagtgttcaataatgatttcacagttctttccttttctaacactttgtctttaagatgagaaatgagaattgagcctcactgttgttcacataagatcaaaatggctttattgcaagtaagcttctaactagatagaacccattgttttctcagggtctatgattcttggttattatttgatttaatttcgagcaggggagagttgggtcaggacatgaaattctgttgttgagcattgggaaaagcctcaaggagggtgttgctagacctgaaggttggagagtgagggcaagagagcagctgaaacacaaggagaagctgggtgctctgaacccagcaatttcactgtcagtaattctagctgaagccctgttcttggcctggtcccacctgcccatctataattaaggtcgtgtctacagttatacagattataaggaaagagaagaaggatgtcatcaagtcataatttccagaatcaaggctcctattttctccatctttttttttcctccctattttggatttggcagcaggtttcctaaaaagtaggccatcatgtccttttttacagttcattacgagtgggcaaggagggccccctcaggctgccaaggccttgatgctggttttctcaggcagcgagaagggagcgtttcctggatgctcacctctggccaggaggcaaacattggttatggaagaatttttccttttatttctaaacaagaggttgtaataaataaggaatcatttgcaaatgtttgcatatccagcccaattttatttttaattctacagtgcatgtgtgctgatgcatttttgatgtaggaaattgttacagatgtaaagttggaaaatttatttgagggtcttgggatttgaagattgcattggaactgtcagtgtcagcccttttgtgacagagttcatagaaggagaacatttgagaacaaaagagtaaatgaaaagtatttgatctaggctgtgactctgttgttaacattattttcataaaaataaccatagacctgacctggcagtctgtgaacacagaattgtttccttgatggagggtagcacagttaagaaagaggatgcctaaatcgtgggtcaaggaggtgaaaaatcagtaccccaggtgacacagtgctgagtgtggatgctatgttggctatgtattcctggttttgtttgtgttaagactcaggcttaaaagttataaagcaagttttgagctatatatagatgataagtagatattccctgaattgtgaaggtttcctttatatagcccaataattgtatatttgcgttctctcccatgtcccctttgattgactagtcttggctgcctgaaggagatcttttagggatgtctgatttggagatggacagggacagaagtggctcatgtattgtgtgcttgaccttctaacccaagagagtcctcaattgcaggcttacatccttcttggttcttgtggggtccccacatcaaccaaaggatgttctttctactgctgcctcttagacatcttcttctcctccttctcctcctcttttctttcctcttcctcctccttttctgtcatttccccctttcttttcctctttcacctgcttttcctttttctctaccctctctttctctttctcctttcctctctttcttgtcctagaaaggaaactcacttgtgccaaacacctgctaagtccttttacatatgtatcatcttatttaattctcaaccaattcttatatttagaattccatttggttacatggatgaattgtatagttgagtctaggattttagtgtacctgtcacctgaatagtatacattgaacccaataggtaacttttcattcctcactcacccctagcctccctgcttctgagcctccagtgtccattatgccactctgtgtgcctttgcatacccatagcttagcttccacttaagtgagaacatgtgatatttggttgttccattcctgggttacttcacttaggataatggcctccagttccatccaagttgctacagaaaaacattattttatagaatcccacttttagagattagggaacagaagcacagagagacccatcaaggtgacacatctcagagcaggacgaggacccaagactctctggaatggtagctcccgccatccactgtgatggccttggtcctgccggctatcgtctcctcacccccacggctgctcctttcccctgtcccagagttgtcagtagcgtcttttggtgcttgagtgccttggctaatcatgaaagactgaattggctagtgagaactgtgggagtgaaggtttatttctttttttaaattagaaaaagaagtcccctcttgtatcatctttgcttctctataaacagtctttgaaaggtacagttttgaccaaatagccctctggtgggaacttccaagaagaatattctggagcagcatctgagtatctgacaatttctcagttagtgcagctggatcatgacgttaaccggaaccaccagagctcggattcccaaaacctaatccttggggaaggttgggggaggtgtctgggacagagccgacatttgagctgatcttttgcaggcactgctgatggggcagagacctgcccttacttaagcttgctcagtgtcagggtaaatgtggggccagggtgtgagggctctgcctgccaggaagaggaagggcagattggctgaggctctgtagaggcttcgtggcaacagcagttccatctcccggttctgcattggcccatggcagcttgatttccagctgccccaggtggagctaagttactgcatgagttgagtttcctccaagggtagaaaggacacatcatgtcctccttcttcccagcattctgatttttaaggggcactaacccagcatctgagccatgtgccatgtgcaaatacacacacacaagtacatttccatgtctacttactcagttggcaggacatcaaagttcctttccagaggttagataaaggggctgcaggacaagagggcaggaaggatttaaataattgatcaagatgtgcatgtcagagccttgtcatttatttgcttgtttgtatgtttgattctgttgttttgatttttaaccacaaatcaatggtttctttgccaacgctcttgctctaagaaggtagactaatagagaagaaacttttagaaacgagtttcctgagtctattttaagtgattcttaatcttaggtgcatatagaaattacctggggaactttaaagaatattgatactggagtcacatgcctagagtttctgatttaattgtctaggttgcaaaatgtacataataatatctaaaagctctataggtgattataagtgtcaactacgtttgagaatcactggcctatctgacaccttatatttgtatgcaggcagaaggctttattaccacggcaagatattcccatctgtaatcataacaaaacctaaatagctaatctttgggtactcatgggctggccagtgtgtgaggtgttttgcctccatcagctcattgaatccttatacaatgtatacctgaattacctggaggactgttaaaacacaggtgtctggtgtccacccccagcttctgattcactgggtgtggtagccgcctctaagatggtccttcctcctgctggccatgatcttgtgtaatgtcctccccttgagtgtgaactagtcttattggcttaattataaataatagaatagggtggaagagagggaatgtcatttttgacaccaagttatagaaaatggcataatactgtgggccgggcatggtggctcacacctgtaatcccagcattttgggaggcagaggcgggtggatcttttgaggtcaggagttcgagaccagcctggccaacatggtgaaaccccgtctctactaaaaatacaaaaattagctggacatggtagtgggcgcctgtaatcccagctacgcaggaggctgaggcaggagagtcacttgaacctgggaggcagaggttacaatgagctgagatggtgccaccgcactccatcctgggcaaaagagcaagactgtgattaaaaaaaaaaaaaaagaaaaagaaaaaagtactgtggcttccatcttgggcacactctctcttgctctttgttggatcatttgccctgggataagtagctgccatgccatgaggcagccctgcagagaggcccatacagcaaagaatggaggtgtgcccacagccatgggaatgagcttggaggcagaccttgccccgattgagactttacatgagcccacagccccatctgactacttgatagcagcctcaggagagacctggagccaaagccacttagctaagtagtgttcaaatttctaacatggaaactgagataacaaatgtttgttatttttagctgctgcaatttgagataatttgtaatgcagcaatagataatccagtaaatctggggtgaggccttagaatctgcatttctaacaagtgcctaaataatgctgatgatactggtctgctgctttgaaaaccactgctttaccctaatactgagaggctatcattagtatacctttacccattacacagatggagaaacagctttagaagttttaagtacctttctgaaggtcacatacaaggtgggtggtgctgggattcaaacacaggcaatctgttccccagagttcatgcccataactcccttgctatgctgcctcttcgtctcatcatgaagtgtgtctattccttctgtgttagattatgttgattgaattgtatctaatggtgatggctgctaatgagggattttggtctggaactttattgaggattataattgaagtggctttcctccatgacacaaatgctcccccaaattaggattactactgggatagtaataatttgtctttggatatagtgtttttcaaaccttggcatgcagtagaattacttggaaggcctgttaaaatacagattgatgggacccatcttcagtgtttctgatgtagcaagtttggggtagaacctgagaatttgcatttctgacaatctcccagtcaaggctgagggaccacacttagagaaccactgcttttgtcaaagggttatgatgctcatcctatgttgagaagtgctattttggctgaatactctgagctgtttagtgcagagagaagcacaggaaaatgaagggccctaatgctcctcctggtgcatatttttaccccatgtgccttcctgctagggctagaacatatggttggaggaaccatgcagctgggctctttctgcacgtcccatgcattccaggatgagctcagattccattctaattatcgaaggcagagtgtggttgcaggcacccaacagtgctgctttgtgggaggtgttgctgtttgtgttagatcttgagaaactgaaatgggaatgttgacaagcgactgcttgggcaagtctatctatattatcagttgtacaaacagagtaaggatggggcgcagccttgacaggtggaggtatgaatgaatacaggttaagccaaggctggcctttttttttttttcaagccaaactatggaagaactgttttacattttggatgcccagcaacatttcccttgccaatggaacctgtgttttctttctttttttctccatctctgatcaactccttcattcaacctgcagctgtatggccaattcttgcctggccagaatgggccttggtgttggcatatggtggttgagccttggccatattggagagtagagctggttcgaagcctggagcaaggacaccttgccttcctttgcaccagtactgaatgtatgtaagaaccacagctggcagattaacttggggttgccgacagaaagtttgcccttttctactgtccaacacttccgggagactcacagtggatattaagctcaattgtagaactatctttaacaaatatatacccaactctacctctgtttagtagcactaaacagatagcactaaacagacccatggtcatgtggtatgagagaagaggtgctgtggtagaatctatttgcttacaatttttcattccctttttgcccttgtcatccttccctgtagacaaaatactctcttcattctacggagtttggggctattttgtgacttgctttgcctagtggcctatttgccatacaagcttttacagatattacaagtttctatcattctcttattctgattctccatgataagatgagcatgttccaacccgatagacattgctcctcagcctggtcatatagtgatcagacctgcaattcacccacaacttgaagtagtgtcttagagccacagttgacctgtagctgatgtgtaatgtgcgtgacaaataaatatgtgttttgtaagctaagatttgggagttgtttatcacacagaagaagctgcaaaaagctgactaacacagagctagagccaaatcctcatgtagattgcctgatttctcaaggaggaggtgtttgacatacagagccgagctttgtttcacaaattcagaaactcttactagagtggccacttggaaatgttgcctaaatattaaaagcaaaatttgtatatcttcaagagaaaatacagaacatctgtatgagccagcagtagaaaatatttttgtgaataaaacataaaagattgataagttgagtaaaatgaaataagatttttgtacaacaaaggactcataagcaaaaagaaaagaaacctcagaggtgaagatatatatgcacacaatggttgtgtagtaaaatcagaatatgtaatgaattcctacaaatcagtaagaagacaaggaaagcaataggaaaaatggcaaggctattgtcaaaaattcatagaagaggtaacaagaatggccaaaaccaggtagactatcctagtaattagagaaacatgaattaaacaatgagccattctttaacaaacatcagacttgcaaaatttagaaactctgccaatatgaagactatgttggtgaaaatatactctgtgtctgtgctaagaatggctgagacacaaatcttgttcttgggggacttagcatctaatggagaaagcagacatgtgaagaggtaattgtaaaaccttacgattaggcattgtagtgatgaggcatgctcagggtagagtaggatctgaggagggatcctgactcactaagcccatgggagacaaggaagacctcacagagaaagtgacatgaaagggaaaaagagaattccagacagagggagatggagggattgaaagagaatgggtctgattagggaaaatggcatagaattgaaaaatgtgcaatagaagaattgacacagaataattgattccatattgtgaagaaatgagtcagtgatatagaggaaaggctggcaaaactctttcataatatgggggcaaaagacaaagagataaacatttgcagagagaagatcgtgactgtggaggaaatacagtattcatataactgatattgctgaaataatggaaatgataatcaaatggcttgatttagccattctaaaacacatacatatattaaaacatcatgttgtataccataaatagatgtaatttttacctgtcaactaaaaataaattttaaaaggatataatggaagaaaatttgaggaggcgaagaaatattgaagaagttccatttggcaaatactagaaataaaaaaaaaagggaaaacaactaaaatctagacatatgctgctctttcaaaaaaatttcaaggacctttttttcctaattagtaatgttgtttttatctttttaattataaaattaatgtatatttattttcaaaaattagagaaatacacaataaaaaattacatgacatgataatattactaccaagaggtgccattactattatttatgttctttagtgattctctttgctatttatacaaaacagcgattgtattgtgtgcatgtatatacttttatgcgtacatatatgtatacatgtaggtatatacatgtacatgtgtatacacacaagcatgtgtgcatatgtatatatatatttgtacaaataatttatttcttttttaactgaatttttagatgtatatagaaagaaggatcaatggaacagcatagaaaacataggtagttgaagtctcaacatttttagttatttttgcaagttttgttattttcattatgatgattttcaaaatattctgaatttgcagttttgattttttttactcaacctaattattactttggagaggttttgtatattatatattctcctgaaagattttacattttgcctttcatatttaggtcacatttccaagtggctgttttcttggttcatattctagaaacaaatccctggtttttctctgctgtggtcagagaataggcctgaagagacttttcctctttggaacattttgaggttttcatcagggcctaattatgtaatcatatttttgtaaatattctagggctctggaaaagaagactgttttttttttggtttgtttttaaagtaaagcatcttcactaacacttggttttggcagacttttctaatttgtgtaaatctgatagttgtaaaacaatatttcgttgtggtttatttcacatttctctaatggcttgaggaattgatcatcttttcatattttttagccattcttgctttcttgtccttgattttctgattatagcctttgcctttttcttattggtttatcttttattgattattttataaggatttattatattttctaatatatgagttagaagtaacttctacatgtctgtagcttctcttttcttttgcttatgttgtcctttgtcatgcaaaagacttttaatttaatttgtgtcaatttttgttttcgtgttttgtgcttttaatattttgcttaagaaaatcttcccctatgttagattatgaggatattttcctctatgtttctcttgaaggatttataattttgcttctcacaatcaagttttaaactcatatggaatttctccatatatatagtgagaggtaggcagtctatttatttattttttcactttatatggccagttgctacaacattattaaataaattctttcttctctaagtttttattgccaccatatatttgtagacctgtcttggagctttttacttagtgctgcaggtaaatttatctttgcctatactgatgccacactgttttagttactgtggcttcctaataatttcagacaaatagtagggcagatcacccatccttattcttcaaaattgttttgactaattttggccctttactcttccacatgaattttaacatcagcttatcaattgccatggaataccctgttatgatattcaatggaaacatgtatttatatatgaatttagaagctcttgctttatttatgatactgagttttttaaaccagtggcatggtgtatctatctctgtatttagaattatgttcttacatatagttttataactatcttgataaattcctgcctgtttgcatttcctttttgcatttattcttagatattttacactttgtgctgttcttaacaatgagatttataaattttattatagtttacagtttttataggaataatattgaatttaatatactgctcttatattcaaaaataatggtaaatattttttagtagttctagcaactttctatattgtcttttattttcagtattgtctatgggactaacagtgatgattttttctttctaatccttcatacctcttcttgcttgcccgcattgactaggacctatatgatgcagaataggtgcaatgataacagcattccctattctttgtcctgactttaaagagaatgctgctaaactcttaccatttcacataatgtgtgctggaccttttagctaaatatgctgtatatattgtatcaggaagttctcactactttccccagtttgctaagaccattttttttcaaaatcaagaaaggttattaaattttatcaaatgcttttattggcatcttttgagatgctcatatgctcgtataatttctctcctttaatatgttaataaggtgaatttcattaatagattttttttaacatttaattatgctgggatccctggcatatttccgacttgatcattatgtgtttgtgtgtgtgtgtgtgtgtgtgtgtgtgtatacacatatatattttacaaaattatatataatacatatatattaaaaatacatatatatacatgaatccgtatactatatctccagaatttattcattctgtaaaattgaaactttgtacctttgaccaatatctccccatttccctcaccccctaaattttatacatatattatatataacatatataatacatatatacacacatacacatatataaacacatgtacatatacatacattgttgcattcagtttgctaatattttaattaagaggctattgtaaaatttgctgtctatatttttaaaacctagaggtaaacttggagggaattatgctaagtgaaataagccaggcagaagaagacaaatactgcacaatctcacttatatgtggaatacaacaaagttgaactcatagaagcagggagtagaatgatggttgctagtggctgggggttgggggtggagaaaattgggagatattggtcaaagagtacaaagttacaattttgcaggatgaataatttcaggagatctattgtacagtatggtgactacagttaataaaaatttattgtatacttgaaaattgctgagagtagaccttaaatattcttaccacaaaaataataaatacgtaaagtggtaaaaatgttaatcatctttattcaatcatttcacagtgtatgcacctatcaaaaatcatgttgtacaccctaaatatatacaattttaatttgtcaattataccttaataaagctgagaaaaattaaaaacattctagaagtatttttcaaatttgcctcctctatttttcattaccattttctttaatcatttttaaaatctcttccataaatcaaggtattacttcttaattttcctatttgttatgcctggtgactctccatagttgtggttcattttcttatttggtttgtaatttctgattctgaactcatcttcagcagtgattgattgctctggtagaatccagtagttctgtctagcagaatcttcttttgtgaatcttcatgctaatacctgggatttttctggttccccttcaaagcctaaacagttctttgaggatttcatgtttatatacatttctaattcgacccttgctttatacagaccttgggttgtatattcctatccttctgtggacagtgaaacccctgccatctgttcctgactctgaaagcatcctgaaccattgcagtgtcagctcatacatttcctgcctttatcttagcatcttgagatatatttttctttctttcaagagcttctatgaatttttacataaaaatttatatcttggattttactcaggatttctgtcagtttgttatgggagggagtacttttttcagaactcctggtatgtcatttttctagaaattcaaaatctcttcattttatttttaacttttataattatattatctctgcaatttttcttgatcttaaattacctttgtgtctgactgcagtagttttagtagtttgattcttttccctaatacttttttgcccttttacttatttaatctgattcttctgaatgcccattttttttttaattgaagtatctctttttagattcagggtcttttgactcttgacaaaacataaaaccctttagagcagtgcttctcaacctgctgtctagaggctaccagcattagaaccatcttgattctttcttagaattgaaaattccctggcgttcctctcattcaagatgatcaaaatcatggaggcaggatcctagaatctatatttcaaacaaagattctatacacttggagaattgctattaaatgaaaagatcaatcttatccagtatcagttcatagttaaataaggtttaagttttcttatttgtgtttctacatgtttttacacagtcctctagcccgaaagtaggaagacaaatgtccaggttttctctgaattccagttcccaacttggacatccagaagcctctggtgagtcaggaaggagctaaggctagaaaccctggtggatctggtggtggcacagaggaggccttcatcagtgggacatccaacatcttctccacatttgacatggtgtccagaattgtcccattcttttttttttttttctgagatggagtcttgctctgttgcccaggcttcagtagagtggcacaatctcagctcactgcaacctctgcctcccgggttcaaatgattgctgggcctcagcctcctgagtagctgggattacaggagtacaccaccatgctcggctaatttttgtatttttagtaatgatggagttttgctatgttggccagtctggtcttgaaattctgacttcaagtgattctcccaccttggcctcccaaaacgctagattacaggcatgagtgagccaccgtacctggcccaggagtgtcccattctcaggccttacatactagtaggtcctttatctgcccttggtggctgatgaagctggaagatgtagaggaccaccaagagccatggtggaaacaagatgctattgacctccagtggtgagatggaccccacataggctggccccattgccctcagattgacttatcagcagctcaaccctatgagtcaatttctgctgggggccttcttctctctctctagacaggctatcctttaaaagaggaagtcaggcttgtgccatccttctttcccctcccatctgaatattttggggggctggtcaagattttggtccctgtgtatggtcttttgggcattttagtgggactctgagaaggcagaggctttatcagtttcctttatgtatattaatgagtttcttggaatattttcacagcatgggtgtgaggatgagctacaagaattttcaatgtgaagttgagtgattttgcagttgagtcggacaacaactctgaaggttgctcttatttccccatatttatggcctctcaagtattagtaaatctaaagtatgtgatccaataatttagcaaagtttaacttgatgggttcaataatttaaaaattttaaagaagcaatgggttagtaaatttgtagttattttctaggtaaaatagtaaatgatattattttaagattaaataaaattttcacattgtttcatttatactgaaaaaaaggatagtagaatttcaaaagactgaaaaaatttatctataggtgggttgaaaaataaatattacagctatttaatttcccaatttctttttttgtgtgtgtatttttacttcttttctcatggcatcaacatttctgagccttttgctgctagttgtctaaaagccatttggcctttcagctcaaatcacaaaccccaatctctaacttccttgaggttgcaacttgagcacctgaaaatgtggccagcttcaagccagagtgaaaatgtttttttctttcatcccttttgacagcatcccaactaacaccactgcaagagggaaatgtcaaattgaggtgaacacccagctcaggtctgatctctgagccatactgcctcgtttgaatagggaaactaggaaaggaggggtgataactcagccatttctaaaaaaggaaaatgataacaacctttggagggccagccatagaaaacagccctgtgagtgcatgtcaaagcagccaatctgcttctgcttaggcagatgtcatgggcctggatcaaaggaaggcctgctccgtgccatgtgctcctatgaaagagaaagtgggtggaaactggaggcttttgttggtctttggtgttttcttaacaagagaacagcctcctagagaaacagcgaaagagccaggtttctgcaggagaggatcccacggagcagcgttggctgaggtcccttcagtgtggcaagatgctgctctctctggtggagggatttgggttcacttcctcgacggaggtggttccctgaggccacccaacattcaccaggctcactgccccatccttgctcttccatgctgcctctgtgctcctggtcaggatgtttgtcagtgcttgagaagggaattaccatgcccattttagaatggaagaaaattaggttcaatagagtgccctagggcacaaagcttatatacccgagtctggattaaaatttaggcctgcctgatgctaaatagcatgatgttgggcaatccactcactgtctctggttcttacttttctctctgacatgggtgattgttaaggtcagatggcattcattcattcaacaaacattgtgtgctaactctgtgccagaaactcttccaggtgctacagatgtagcaacaaacatccctgccttcacggaacttcccatttggtaagggaacacagacagtaaacaaagataatgtcatatgcagtatttcagagagtgtcaggtgctacatgggaggcgggtagggatggaggggtaaagaacgctggtgggaggtataagatttttagctggggacttcaggggaagcctcatggataaagtgacatttgagtaaggagatgggagactgagctacatggataattaggggacaatattacaggacgagtgagtatgtgccaagtctctgatgcaggagtgaatgtggcacatgcaaggaaaaacaagaagtcactgtggctggagtggatcgaaggagagggtgtcttggtcctttcgcgctgttttaacaaaatactgtaaggtgccagcagatccagtatccgctttctggttcagagacagcacctccttgctataatatccttatgtagcagaaggggcaaagcagctctatgtggtcccttttttataagggcacttatttcagttattaggactcttcctttatgacctaatcatctcccaacagtcccatcttctaacagcatcacgttgggggtaaagatttcaacttaggtatttttggagacacaaatattcagaccatagcagagggaaagtagaacaggatgccatagaggtaatgttgtggtgcatgggagggggaaggttgtcacacacagcaatctgtaggcctttataagagatgatgtatataaaaacatttttgatggtcaaagggctgtctaaatatatatgcaataatgtatacatatctgttttgggatttgggttctagactcagtctgcatagtaggttttagtgtctcactctcagttctgaaattctggctcttggaaagtcattgttctcaaatgggatgccatgatttgtaggtgtaatctatcccattgcaggcattaaattcttgataaacacataacatacgttcttttctgaaattgaatttgtggctactatggctgtgcatggatttttaagttgactggggttattatggggtgcaatgtcttaagattataaaagctgagttgtagcttaatgccaagccaatatcaagtaaagacctaattctcctgaaatgcataagaaggtcacctagtgaggatggaagtgaggaagatcagaatggtgaactgacaactccatcagcatcccagcaataaagggagagaaaatgtattattcagtaactgtggatgcttttatagacactgcaagacattgttattatatagtagtgcttgtgctttcattatggttgacctgttacaatctgttattcggatattttaattctgctaagcatgaacttcaaatattcaaaaacgtgtggcaaagatatacaagtaaaaaagaaggttgagaatgaatattttagaacttagagactgtacgtgctgtgttactgttgggtggatcacttttggctaattatgaaatttagatacactgattagtcaggtttgactcttgcattaaataaattattttgctttgacattgggtacttggtttacaaagtactctacctttcatcatcagattttatcctcacaaaactcttgtggaggaggtagtatggaattgtcaccttcatactacaaatgagaaaatagggaaatggcatggttttcccagtcacactagtatatagtggcagcaaagatggaatgtgagttcaaaggatcaacaaactcataggttctttctgtcctagactgacttgtgaataatagcacaatagaggaagacagttgggtcaaattagttatatgttgtgtgtagaaaaacagccttccaataatggcacttcccatgttaattattttgcatggtgtgtaaaaagagcttgacacctatgtaggaggttcaaagcagctcccaaactatattgtcttcatgcagcccagctaccgactgagtatggctagattgtcagtacactgctaacttctgtgttctctcctgtaatagcagactggactctgcaggcctgatcaagtaggaatgggtgggttgaaagtcgtgatcattataaatcaattatctgcagtttgctcaagtaagggtccttgtcattatgcattatagcttaattttcccaactaaattgacctttcagtggcccatgcccattattgtttattttagaaaacttctaccattgcccattctttagagcagagctgcccaatagaactttatagaatgatggatatattctgtatctgcactgtctcctatagtagccactagacatgcacagctattgagtgattgaaatgtggctggtgcaactaaagaactgatttgttaatttattgggaattttaattaatttaaatatatatagccatgtgtggctggtatcgactacatggacagtgcagctctaggaatgctgtgattcccatgtctcattctcacagctgctgggtggcactggcagttgacagccctcaagagagtcctctggaaatttctgtcagccaaagaaagccccttggcccagggtcacacttctttctgggacagcccacattcagtgactggtctgggcaggatataatggtctggccccctcatcccaatttggaacagctctgaagggatattctaacttcagaactccttatgggactggcaaggcttctattgcaactgtatcccagttctgtttctcccctgccttgtgttcttcctgcacccctcacagatgttgaccccaagagcatgccccagtaactggctgcatgtgaatgtctgtctcagagttggcttcttgggagcctgatttatgacactgtccctggcctcccacccaattctgcacatctcagatataaactgttaaaacaagaaagcaaatgcattgttaattttttcataacttgcattttacatcagcctgggcccatatcacaccgggaaaaggaaataaagtcatctgaataaaggatacatttctgcaagaagttctctgtccaaggagtcagtagaaggaaacactatgaatgacactgtattctaaattttgtcactgtcactttctcttccccccacaaggtcattttcttaattcaacaaacactgactgtgcatgcacctcctatattctagaccaacattagggttctaggtgcacagagatgacaaatgcagtatggttcttgttctcagtggctcattgtgtgggtgcagaaggagatgttcaggaggcattagataatccagtgccaaaagtgccacatttaaggtaccagggtacactgaagatatgcaggaggaggagggactcttctgtggggatcaggaaactgtgactctcagactagttttgtatgggtcatgagttaaaaatgttttccaaattttatattgttgaaaaatactcaaaagtagaatcatatttcatgatacatggaaatcacatgaaattcaaatttcagtgtctatacagaaaatcttattggaccacagccatgctcattagtttacatatcatctatggctgctttcacacaccaccaccagggttgagtagttgcagcagaaagtgtataccacctgtaaggcagaaagtaagatatttactctctggccctctacaggaagtttgccgactcttgggttagtgcaatcaaggaggtctatctgtaaagagttgcctctgaactgggttttaaagcatgaaagggaattttccaggcagaaaaggaccagatgaaggtaactctggtagaagaaacagcatgtgcggaggcatacaggcaagaggcaggaggcaagaaaggaatagtatgcataaataataagtatttcaggctgggagaggtggcttacaccggtaatctcagagatttgggaggccaagataggaaggtcacttgaagctaggagttagagaccagactgggcaacaaagtgagaccccatcgataaaataaataaataaataaattagctgtttgggaggctgaagttagaggatcacttgagcccaggagttcaaggttgtagtaagctgtgaatgcaccactacattccagcttgggcagcagagggaaaccctatctcttacaaaaaaaaaaaaaaaatgttggtgcatttgggacattttgtttggagtgaggtaggaagcaagtatgaaaaactggattttcatgctaaggaatttattcttcatttcttaaacagtgaggagtcattgaagtgttttaagcagaggagtagtttggccagtttggggtttcaaggagatcattctggtggcccttacggaggaagctttggaggaggcgagaccaacgcagggagtatttcaacaatgaagacaccaagagcttgacgtggagtagcagcggtggggattccagttcctatgtgagctcaagaacccagagtgtaggaagttcattttgacagactggtgggatgaagccaggacatggggcgggaaaaggttaggaaaggaaagagtgaatcagaggcgggggttctgtgggtggacaggcagctggacaggcagcagcagaagcgatgtaggacgcagcttgggggacagctgaagggctttggggttacagcagcggaagtgacttgagcagaggagggactctggacatcatggacaatggggcactgggaagtgaggagctggcggcagggtgggcacaggatgatgacgatgataacagtaatgatgataatagcaataataacagtggaaggtcaaaggcagcttcctctgagatggccagatgagggagggggctagtgtccagctcactttcataaggtcgggctgtaagtggtgaaaagcaagctttgtgtggtagaaacagaggccagctgctgccagaggggaaaggaaggtggaggctgaggtgggatattttccaaacccaagaaccaaagtaaataggaaatggaatctttaatgctatttgagctcaaacaaaagatcaccacagctacttcagttgagttccagtgatccctttcacttggccaggaattagcgagaggcctccccagctgtgcatctctcctctaagccttcacctgagaatgagctgaggtttgaatgaggcctttatcctgagagttcagggggctgttctggctccctgatcaaattcaaacctctgttttgggagacagacatgggaaaaatatttacccctttcatgttgacacatggatatacagggcaattctgtcagaatctacacgaagccagagctgcattttaagccagtatcaggggccactgtttttggggttgcttaggtgaccgtgtttggggtcagttgcctgatatagagggagtgctaaacaggggcttgtacagaagatgacttggggagtttgagtccacttacccttctctacactgtgagaagcaataacattcttgttaaccagtagtatataacattatctcacttaatccttccagcaacagctctcttaagttaaaactaatattagccttattgtacggatggagaaactgataccaagaggaggctagaatagttgtgcaagtcagagtcagtgggaaaaccagattcaagctgagcaacaaaacagaagagactctgatcttgtatatcactggaggattgaggaattggaggagcatcttccagggaacgtctctgttgactgtggaccagaatgctcttcatctgtcctcctggctatctccttctcaactgtcatgtgtcctccccagggtggccttctctgatcactcaagccaaaggatatctcagcatcctgtacggttttttcaaggtactggatataattgtatttatttattaccatgccccctcatttattttgcttgttttcttcagtagaatataagctttgtgtagtccagggctgcgtctgtattgctcactcttaaatcctggtaccaactaaagtgcttggtgcacagtatgaatgatgcatattctgttgaatgaatgaccatttcagctccccaggaatggggcctggccaggaggctgggtttccttgggagcccgaggtggatagtgtccctttggtaggctagtttgaaaggcagcagggtagaaaatgacagctcaacttgtgaaagtaaagaagaaaatgtctcacttttccatttattttctgtatttcaatatggaagagtataactggagatgggtgatgcagttgtaagagaaatgaaccggtacctgttgtagtgttgaaaaacagaattagatgcggaggtgaatatttgttgtgtattagcagctgtgatggctatcggctttacagacttgatctaatttttccctcacaatgatgctgtaatgtaatgctctaatgctttttgcaagcttttccattttacaggtgataaaatagaggctcaaaaagggtaaatcagccaccatctgttcaacattcagacagatggtgaagatgagattctaatgcagttgtgtcaaacttcataactcttttcattagtgatatgagtgcaagaacttgagacagactgcctgggttcatattcctggtctgtcaattactggggtgtgtgattttaggaaaatttcttaccattttgtgccttagtttcctcatctaaaaaattaggataatactggtgcctatcttataaggttgtagggggactaaataggtcaatactgttcaagtaaaaaatctaaaacaatacctggcgctattgtatattattttatcatcatcatcatcatcatcatcatcatcatcaattatcttcctcctcctcatcatcattttattggactaaatactctgcttttggcttcctactttatgattaattttgtatgtcaatttgactgggtaaagtgatggctagatagccagtaagacattatttctgtgtgtttctataagggtgtttctagaagagatcggcatttgaattagtagactgagtaacaaagtttactcgcatcatgctggtgcgccccattcaatccattgagggcctgaataggacaagaaggcagaggaaaggcaaaatagttctctgcttgaactgggacgtcatcttttcttattactagacattagtgtttctagttcttggggctttggacttggacttagattattggcttccctggttctcaggccatcacatttggaatgaaactctatcgctggattccttgggccttcagcttatagatagcagatagtgggacttctcagcttccataatcatgtgagccaatccctaatccctcgtgagaaatatcttcctatatatttctatttatcctattaattctgtttttctgaagaacgctgactaatatactccttctaagctgaggttgtgcagaggctgtaactaggaaggggaaccatctaggaagatttgagtgaaagttccagttcatgggggccctggaagcagcaagaaatagatcatatctggttcttatgaaaattatctttttcctctgctgcttctttcagaggctaagaggttccatttcaggtttcctgagtttctgcacagtgattgtgacctttctttcctttcatctttcacttctggtagaaagggagagtaacgagatgaagactttattaggaaatgaacacagcaaagtaacactacttggccatttgagatagcacattggcaagagtgtcagggatgctgctaaggatggtgcaaggccaggctggactcagaccctgagctcagacacaggagtctcagggtgatcttttagaagctccagggtccctctaggggtagtagagaagacagaaggagctatgtgacggagggaattcctaggcatgtatctgaaaggtgtctttgaaaaagtaataatttgtaccaactgagagcatcatggatgttccatgactatcaacacaggaatgtttttctattaatggactggactggtatgttttccatttggaggataacccaggggttccacagtgagctaatcattcttgagaggttgggatatatttctttgattttgccccaaagaagaggatgtttttaggagtcttgagagcccgtgcatctatcactgcaagctcttttcgttctaggatgctcagttctctctttaacttgacccccattggggctgcccccccatatcagaaatgtagacagagctaggtccctactaggctgtaagtaccatgaccaaaggagccatggctctagatctggccaaagatgatttgggaagtgtaattatctcttggctttctcagctaacttcggactctgtgcttctctaagctcaggatgtcctaaacccatcttctctggagaaatcaggtagacaagagatgagaggactctggtctccctacaagtttccttggcctctcccagaaccctcaaaaacccagaatgtgagttccagtgtaatccatcagtgcagaaaagaatgtgtgtggtttgtttaagaagaagcacaccctatgtggaaacacacatctgctgggtttttggtgggatgtgctctgctcagcctagagagtcaggcagtggagaatgtgtctgcccataggtggcagtacccaggtgagttctacagaaactagaatgcaatgaggtcctaaacttacagcaaatcaataaaaatcctaagtaggccctgatctatctatgaaaatatctccctcccctaatttccactctttcacctaactggggacaagggaagtaaaaactccttaggaaaatgggagaaattttggcactatattctagtataaatggttaattttctgaagttcaaaaaattggttaaaggtcataaaagaagaagaggattcatttgcttgtttaataacttactaaacaacatctttggcaagaacttatgctcagttaagggaaataacaacagagtctcaatgctagctttgagtttggagtttgctctgaaagataatacttcctgttgcctctttattgttatatcacaagtgtataacaaagtggttgaacttgattaggatgtttatatagctgattacaaaaaaaaggaaatggacatttattgagtgtttactatgtgcccaacactttctcatctaataaatattgtagtgtaatgctggtcacactcaaacactcagtggattgtagctgtcaatccactgattattggattgacagtaattgataaattactggattgacaatccactgatcattggatggacaactacaagccaaaaaatgcctggagccaccagaagctggaagaggtgatgagttttctcccaaaagccgttagaaggagcatggttctgcagaccccttgatttcaaacttctgacttccagactagtgaggaaataaatttttgttgttttaagccaccaattttatagtagttttttgtggcaggcctagaaaagtagtacaaccacctaatataagtatgaccttaaacttatcctccctcagcttggattccctgtatcagaaaattggaaaaatactaagggttgttgtaaaggttccacaagaaacacattggaattattgctcatagaatgggaactggagataaaggagattaattaaacaattattgtctttgcctgaaccagtgacaataccatgctaggaactatatctaaggttcaaagactgtgtgggatccaaattttgccacttaatgtctgtgatcctgggaatcttaggtgggtgtaagtaaactgtgacagaatttatctatgaggataaaaatggtgctggcttattgagtggttgtgagctttgaatagataatgcaaacacaatcagtccttctctcgtgtttattttgaaaatgggatttgttccaaagtaattgatatattagagaataatctgagcataatgtgaattctgtgtctgcttatattgaatttcatccacaagaaacactaggtgaatacagaaaattataacccaatgaactgagctgtgtaggaatacagaaaacacacgttgatatggtttggctccgtgtccccacccaaatctcatgtagaattgtaatcctcagtgttggaggggaggggtcgggtgagaggtgtggatcatggaggcagacttcctccttgctgttctcataatagtgagtgagttctcacgagatctggttaacaatgccctttgtgctctctctcctccaccatgtaaagaggtacctacttctccttctccttctaccatgattgtaagtttcctgaggcctccccagccatgcttcctggagagcctatggaactgtgagccaattaaacttattttgtttataaattacccagtctcaggtagttctttatagcaatgcgaaaatggactaatatgcacatgtacacatctcaaacatctaccatctcctcagccacatgtgttaagagtcacattcatccactcttagtgttacaaccttccatctgatttcagacgactctccttcataacaactgacaagctgcaacccaatgcccaggaaacttatttcgcaagtaatcctcagatctatttaaaggtaaagtgccatatttatggtgatatttatgtatgtctgaccctggaagcactgactggaatccctgcttccatctccacatgaccttcttccttggctctctgtgtctcaaatctctctcttctctctcttttaaaatgacctcatctccagatttataacttagttacatttgcagagactctatttccaaataaggtcgcattcactggtaccagggtttgtatacaggacacatatttttgggggggacgtccttcaacccagtacagtggtatgatggccagttgtaccttggtcctttgaaaagaagcacattgctatttctgctagaccataaagccacccagcatttgaagtgcagagacatatactccattccctacagatacagtaagattttaaaatactgaagctgataagctctatctttggcagaacttagttttgcatccttctgccaattgccttcccccactcttgggggatatctatagaggatcacttcagtatctaagtggaaagctttatgggaagaggatctataggttcttctaggtgctaggaagagctttgtgttgcaggtgagcacacctggggcctgtagatgtgcttgggggatagaattcaagtctttctgaagcagaccttccttctggactcagggatgaaactcttgcagcctctagtcaggacaccaaattacctagatcagtgcttctctgactttaatgtatgaaagaataacctggaatatttgttaaaatacagaatcctggactttacctgcagagattctcctttagtaggtctgagctgggcccaagattttgcatttctaacaaagttttaggtgatgcttttgccactgattaggagaaccactatctgagcaacactgatctaggcggattgtacaaaaagccatgtgggtcagtctttgtatgtatcatagtgaaaaatggtacaaaaagagcagttcaaagtatttaaaagtaattcttatttggactcttgcttcttaagaaacattaaaaaggattgaatttataagctagagcaatagctctcaaaaacttttctgtgctttcccaattctttcacccctatggcagaacagatttttttaattcaaatcctgaactcttcctcattaagctctggactttcctctttttctgcctcttgagtcctctgactctgattctcaaaattctagaatctaagttgttaaagaaaaaattctcccagaggcagaagtgaagggtggagctggcaaggcagataacactcccaagttgataaatcttgtatctcccaaagttattaatatttcacatctaaactccaaagggaaacctcactgatccaaagtgacctgcaaccactcaagataatgtttcttttttaaataatttaactttttgtgacagaaaagcaagggcaagtgtgtctttagtagctccattaacctataattttccctataatgccactgagattggaagtgttgttactttaaaaaaaagtctacttgagacaaacttgttgattatattatcagaatttctttatacaggctgatttttggtcttctgcagaaagtggtatgttaaatttttccttataattgtgttttcatcaaatcctttgtacatttagaactatttgccttatgtaacatgctgctatgttgtttgcagcataaacattttgggttgctaaaaagatggatttatatttacccattttcatctgtcacttatgtgagggattagtctataaatattatttttaaagcaatagaactcttttctcaaagtgaatctaaagcaaaaccccaatatataaaacattagctgcttagacctagaggagatgggtctggtccagcagttttcaaccaggctctgcaaataaataaataaataaataaaccccatggatcacaatttgagtaaatattttccaggctatccttaggatagtacatagaaaatgggttagggctgtagggcttccctagaacctgggttgagagggttgtgaggtctgtggcctggtagagaggcactttcaacaaattagcgttattgtgcttccttcagacaatgcttcccccaaaatgcatatggttaattgggattatgcactctgatagtgattgaaaaaatctctccatccagtctatggttagtgatgatcccagatacaggtgaaagaggacaggagcccagctacaggaaaagtcatcaggtcaaggaaattcatgatgtatgcacagagtaattattaagatatttttctgatatttcatatctctttccttctccttttttctacctccaccgcctcctttggtgggacttactagagtatggagtgagaattagagatgaaatgtgtccctctcgcagaatccgcagaatctgcttagctggaagttagcccctggagggcagcaacttgtctgacctgctctcggctacatccctagcacctaggatcgttccttggtgggtgcatgagtgggtgactgactagtgggtgactagtccttgacagagtgggtgtcatggactaattggagagacagatatgaacaaatacttttgaaatgatatgatacatgatgacatagatataccctgactcctaatgaagcacaagagaaggatggatgaaacctatgtgtggaaattagaccagggaaagtatcacgaaggacagatgttattacctaggactctttccccatctctgagttggccatgcacaggggtaaatgggacagctggatgctgcaactggtggaggaaggctaacacagagttgcatggtgttattaaatgtcccagtttccagtctgagagtcaggattagtctcatttaagaaacatgatctggccggatgctgcagtggctcacacctgtaatcccagcaatttgggagggcgaggtgggtggatcacttgaggccaggagttcaagaccaggctggccaacatgatgaaaccccatctccactaaaaataagaaaattagccaggtgtggtggcacacacctgtaatcccagttactctggaggctgaggtagaagaatcgcttgaaccctgggaggtggaggttgcagtgagctgagatcacaccactgcactccagcctgagtgacagagtgagaccctgtctcaaaaaaaaaaattatccttgtgacacaggtatgatacttcctttgttattggttgagtaatcgatagagttgaatagtatgttcattttaggtcactggggtctggcaggcaataagtggtctaatgggttgctggctcctttttgctgatccactaaggcagtgttgttacaggatttttcaatgaaaaaaagaatccaatgggaggaaggtcactgaagctatacctgctttgtttcatgggacaaatattatgccttgccttacccaggaattctaatatgcactcctatcttgtggatcacatctaaaagtagaagtcactgtattttttttccttatgaaccatcttcaagaagatttagttgagctttacctctgaaaagaatcaacatttttcaattcccaaatataaaatttcatttgaaacttccatgtgcttttttgaatgtaccccacccctgaaaacctgctcgagaggccagtgcacccctctagatagggattattgggtgagatgatggaaataaaaaacgaaaatgggttctttttctcagatagctactgtcttactcaaaaggagattaaaagtaaattaagaaaaaataaaagtaacttcaagtataaaaccattaagaacaatgcttaaaggaattgcaggaacaaaatcaaacaaagcaaaacagaaatgcctacaaaaaagagctgtaaatattagtctcaaggaaaaaataagagcaaaagttatatatattctctgtatatatatatgtatatgtatagtatatatatatgtatatgtatatgtatagtatatgtatatatttctatagactaatatattacacatatatacatatatagactatatgtatacacacaaatacaatatacacacatacacatgtacacacactaaggtctactaaaacacacacaaggcttcctatgcacctgtctgtgtctccctgcccaaggactttacctggccccttcagcagtgtgaggttactgaagttcactctccaggagctctataaccagtgatggacaagagtttctggaaaaatatccagcttcccatctctccatgggagaactctagggtatgttcagcattttttagtgggccccagtgggatccagctccaagtgctcacagggatagcaggtatattataccacccttttgctggctttcttcacttccacactttttcactctgctgctctggatccagaataatcatttctcacctaaatcctcaggggctgcttttgggagaattcagactaaggcagtacaccatagacacacctttcaagtttgtcaaaaatttattcaggtattttaaaaaaatgatgcagttcaaagagatacttctatttctttatctagatatatccttcttatttatattaatgttattagatttatctacatctctattcagtgctattgaaataaaataattgaaaataatttctatgctaaattcccatttgtaattatttataactttcaagagactttgagtccaatagatttttagtcactttatgtaaaatctcacttttttttcttttaaattttatttggcagaagacttggcctgtcccatatggtgagtgcatgtgaagtcccttggtggaaagtgattctttatatttgttttcctgaaaatttattgtcagaacattgttttggaatatgtgtaattcctctagggggttaaatgtgggtggtgagctgtgtagagaaatattacttatgacccatcctgggcagtgatattctcttacatatttagtctggctttgagtacctagttgatgttaaacaaatgctaattaataataacctaatagaaaatggatttagggcaaacaaatgcaatgcctaatgacatcctagatttttcaaacaacattcatcacatttattttagtcttctcaaactgaagccattatttcaagtcagttctgcagaaaagaggaggttaggtttgagtgtgttttttttttttcccagaatattccattctgtaggtgcctgtaattcctgggctgagatgaggtagctgtgtgcagtggggatgtataggatgagctgtaagtttcctctataagcctgaggttctttcttctccaaagaggacactcactgaaatttagtgcatcatccaggaaactgtgttattccaaaagaagataaaagttttatttaattaatagcatggctgaaaccacagactcccccatttataacctggattggcgccaagatcaggatcaataagaatgcaaatgtggtgttaacaccttcttcctctcaagaactgttttatccctcacttatccccattcttccatagagaccatctagagttagttattcatgttctggacccacacgctttccaacttttcttcctcattctggacctgccatatctttcagccacggttcgtccaagatgaacaaataaacacgtgatgaaatattattccaccttaaaagtgaagggagtcctactgtatgtaggatgaacatggataaacctggaggacattaatctaagtgaataagctagtcacagaatgacaagtattacgtgattccacttacatgaggtatacaaaatagtcagacacacagagagtaaatagtggttgccaaaacctggagggagggggaaatcggggagttgctattcaatcagctttaagttatagttttgaaagatacttctagagattttcctgtacaacactatgtttataattaacattgcattgtacacttaaaattttaagcagatctcatgttaagtgttcttacacaataaaaaataagaataattaagaagacatatttaggtttccatttctaccacgttcttctctgagcttcagtttacttctctggaagtagtgataataccaacctagtgtcattatgagaactaaatgtgataatgtttattggatgtctggcacgtcagtgacagaaaatggatgccagttttatgcccattagagaggtgtgcaaggcttagtgtaagcaaaggctctagagctgaattctgcctttgttacttgtgtggttttgaggaagtcttttaatctcttgctctttgactcagtttccccatcagttaaataggggcaataatattatctaaaatagagggttattttgagaattaaataaggcagtgtgtgtaaagtgttctatggatgtttgccatattattattattcgtttcctagggaaatgagtagtccttcttcattatctcttaatacagttctattattctgtgattctcccttcctatgtaggaaaaatgggttctcattgctaaaacttactaaggaaaatgctgatctcccaaaatagctattgagcagtaattttcaaaatacatagtaaacccaagctatacatgaaaggctcttaaactaggtcattgccgcgggctgcttagagagggtgccactggggtgatttatgtctggggggattattaattaaacaagagggtctgtgtttttgaaaaatgcctctgccacagaagaactgtgcctgaagagacataaaggaagagatgtgattagagtgtatctgtatctctctctatctctatatatattcaaaagattatgcattaaacatatttttttttccctgcatttaatgctttcaaagttttcatacatctctgtcctgagtttggactgctttggcaaactcgctgccttaaaggaaatgatatgtgcacatgaaattgctgtgtcaataagagatcggttcttgtttctgaggaacagatgaagatattggtgtgtgcgatatgtgtgtgccagttctagcagtgtttgtttaaaggcatatgaccacctggtatttttctgtatcagatttatttggagaaacttttttttttcagatggagtctcgctctgtcacccaagctggagtgcagtggcgcgattttggctcactgcaacctctgcttcccggattcaagcgattctcccacctcagcctgccaagtagctgggactacaggcatgggctaccatgcctggctaatttttgtatttttattagagatggagtttcgccatgctggccaggctagtcttgaactcctgacctcaggtgatccaactgccttggcctcccaaagtactgggattataggtgtgagccaccatacctggcatattttggggaacttgacaaggacagggacttggaggttcaccttcagtaggtgaaagtctcttgtaagaatgttgaaggttttttttgtttgttttctttttttttttttttttgaaaaattattgtcaaggactctccctgcattccttccatcctctttctcagtgacctcttctttgtcattgcattcttgggttttcttttacttcattaccctaaaaaattatccttcttaattttgtcctctatttgatgaaaatatctttgttgatttttttctggttataaagcacaggacaatggaacagaataggaaacgcaaaaataaagctgcacacctatagctatctgatccttgacaaggctgaaaaaaaaaaaaagcaatgggaaagggctccctattcaattaatggtgtgtgataacctgcctagccatatgtaggatgaaactggatgcccaactttcaccatatacaaaaattaactcacaattaaatattttaatgtaagacctcaaacagtaagaatcctagaagaaaacctaggaaatggtattctggacatcaaccttgggaaagaatttatgagtaagtcctcaaaagcaattgcaacaaaaaacagacttgacaagtggaaactaaaccaaagagcttctatacagtaaaagaaactatcaacagggtaaacagatatgctacagaataggagaaaagattcacaaacgatgcagctggaaaaggtctaatatccagaatgtataagagaaacaaacaattcaataaacgaaaagcaaataaccccattaaaaactgagcaaaagatatgaacagacacttctcaaaagaaggtatacaagcagccaacaaacatgaaaaaaatgctccacatcattaatcatcagagaaatgcaaatcaaaaccacaatgaaataccatctcacaccagttagaatggctactattaaaagtcaaaacaacaatagcaacaacaacaacagatgctggggaggctgtggagaaatggtagcacttacacattgttggtgggagagtaaatgagtttaaccactgtggaaagcaatttggagatttctcagagaacttaaaatggaagtaccatttgactcagcaatcccattactgggtatattcccaaagagaaataaaacattttgccaaaaagacacatgcactcgtacgttcatcatagtattacccataatagcaaagacacgcagtctatctaggtgaccataaatggtgtattggactatctccttgttggtcaacctaaaataaaaaccttttctgttctcaaaaaacaaacaaacaaacaaacaaaaaaaaagttgcacatatacaccatggaatactatgtagccataaaaagaatgaaatcatgtcctttgcagcaacataaatgcagctagaggccattatcctaaactaattaatgcaagatcagaaaaccaaatactgcatgttctcacttgtaagtgggaaattagcactgggtacacatggacataaagatgaaaacaagagacactggggactacggagcaggtagagagagcgggggacaagggcttcaaatgatctattgggtactatgctcactacccgggtgacaggatcatttgtacctcaaacctcagcaccatgcaatatacccatgtagcaaacctgcatatgtaacctctggatctaaaataaaaagttgaaattatttaaaagggcataattgtaaaaattcaagtaatacgggtatgtaaaaataatcacatctaagagcaaaatgccctattaatattttgggattcagccttccagattttttctgtgcctgcatatacatgctcacatacatgaagtgttttgtaaccggactatattattcatggtacaacattaatatagctctgtgtctatttgtctttaaatacagctctattgcatttgtttttaaaagctgcataatattttttaaatgtagtaattcatttaccagttctataggtaggaccccaggtttttatcaactttgcttaacaaccctgattcatgtatgtaatatctttacacaattgcctggtcattgccttagaatgaagtcctagaaggttaatggctgaagttaggtatatgaacatttagttttgatgcatattgataaatttttctccagaaagattgttcaaggccaaattctcacaatagtttacgagtgcatagttctccatgtccccaacaacaggggataacattgatctttatactctttgacaatttgatgggcacaaaaagacatattgatgtttaaatatgtatttctttgaatatctgaggttgagcatctttttcctctgtatattatatcccattgtatataccttttgagaattgcttgttcatgttctttcccatgttttccattggaattttcattttaagattaatttgtatgatctgcattgattgagaatattaaccatttttatgtcatatattgtgtaaagattactccaagttttatttaacactgtatgtatctttgattacagtgtttttgtccatatgaagttttattttttatgaataaatttgttaattatttcctttaagatttttggccttgatgacaagctaataatggccatcttcactccataatggtaaaattaaatatacacaaatttgatattacacatatagggaaaatataaagtttacattcataagtaatgtgtgaaggagaagcatcttgagttcagcagctgggaagatattttaatatttcaaggtttggggtgatagtatcagttacctatgtgattgccagagcaagtacgagtgtcagagaaagtactctcaaccttaggatgcattaatgaggtgcagaggctggagggtgagggtaagagttcaattttattctggtgatttgggacaccgtctatatttagatatggtggagaacttcaaaaattaggttatgtgagacttgattgaaagaaacagaggacttttccagaaaataaattactctttggaaacatgataatcacttttaaattttttttgaaaaatttttatgtgaaacacagatcagattgattctaaatttcctccagggataaaatcaatgtgtctaagatatagagagataggcttctatgcaatctaaggtagacttttctaacagcagaggtcccactaggctgggttgggtgttgtcagtcctttgtcactgggtgtatgtaagtaaagattgaattgcctctaagataggttacaacttcatcatctgtcacctagattggtttaaaaaacaagccttttaatgggattccctttctccagttcacccttcttcaaacctatcctctatacagttatcagacagatacagttaaaaagcaaaactacttcttccacttgtcttcctgaaattattcaatggtttttcataaatttcaatccaaacagcctaatcatgtctccaaagcctcctgtgaaccactgatggttttcccttatctccccagttcactatttattctcctgcaacaataaactatctataggtcatcctgtacaccatgttgtttcttatcttgatgctgggatgcactgctttgcttctttacctggctaatttctatttttcatttaagtgttggcattaaacatttaagttccctctcctccaggactttctccttaatcactacccctccattaaaagaagggttagtatcaacatctccagtgtggtatgtagtttgaaagggatattctatatgcttaattgttttattacacctaataaaaacaaaaggagaaaatatttatacacctattcaatgtctgtttattgagaacctactaaatgctatatgctgtgtaaagtgtattttatatgatttttaattctcccaacagttctatgaagtggtcattgttattatccacattttataggtgaggagatagaggtttagtaaaagtaagaaacttggtcagttaggaccatatagctaataagtagtggatacagttttcaaatctaagacttttcaacctactcttcctccctctctcttttgtctttcataaacattgcccctaacaactgttttgcatgtctgtctgtgttcgttcttaagaggacctgaaatgccgcaattggtaccaatactgtgtgaaacagtaagaggtaagaagttttgagcctgggttactcatcaccaagctgtcaaggaggtgcacatgtcaaatggaaaaaggggtggggaaggggtgtagtccctggaacaagacgatgctctagtcactcacagtctcactggtggtaacctgggaacatactctgtatggtggatcattcttgctggtgtaataaatcaggcatttaaaagttgtgggaggaacagtgtctacaaaaatgtggaggggaaaaagcatctcaaagggtggggctttgaatgggaagagaagtggcctgagagtatatacagatttccggaaatggtcagggagctgactcataggtgggaattgaacaatgagaacacttggatacaagaaggggaacatcacacaccggggcctgttgtggggtggggggagatgggagggatagcattaggagatatacctaatgtaaatgacgagttaatgggtgcagcacaccaccatggcacatgtatatatatatgtaacaaacctgcacgttgtgcacatgtaccctagaacttaaagtataaaaaaaaatcagagatgaagacgtctgggatagaggcatgtaggtgaatacaaggcagtgggcacaaagttgaatatttttgcatcacatgccagtgttcacatttgttaatgcattcaccatgagataagctctaagcagccaagtagacaaaacaacttgaccagttcgcatcagccagccttcatcactggccatcccagaactggcatagatgtgaataagggatcatggtggcacagatggaggctacacattggcttaacggtgtggactttcagttattaaggctgatctggctactgccacctctgaatgcccaacctaccggcaaccaagatgaacactgaggacatattatatcattatctatcatggaacctaacaggcttctttgtgcaagtgtccccatgaccaggagacccactggtcatatcacataccacagtatccagaatcagtgatcgtatttcacttcttacatcctccagagactacagttcatcctcaagggacagatatttattttgcgtatggttttgactttttagtgtacagagcctcggtcagcaccattatcttggagattagggaatgtctcatccatggtcatggtgttattttctccatgaaactgagacctacaaaggtttcataacttgttcaaggttgcacatccataaaggctgagaactgcaatttcaactcagatcttgggtctccaaagcccattcttgctctaccctagcagggccagtatagttttctgcagaaggtacattgactcaggtccagggtacttgatttggccactgtgtaagtaaacctgaacctgaagaccctcataaatcctccttctgagacacaggggtatcttgggaaaagcctccatagatgtttagttcaaagcaaaacatgaaaataaaggaacatccactttcactacatcatgaatttgaatttcaattgaattcaattgtgatgttggtgactttttcttcaactgcttcatgggggtttgtctttaagttttaggccagagatgggtgattaggtggaaaaatctgtaccagcgccaggcttggtccagctcccaagcttctaatcacctctttcaggcccaatccttatctgagaaatgaagttacaatttaaacagagtcaggtgtgtgtgtgtgtgtgtgtgtgtgtgtgtgtgtatcaacaaatctcacttcttgtcttttctttctaacctctgatgcttatgtcttagaaacagccttctgtgctgggtccttttgggtcatctgccttgagttcatcttgtgttaggcttgtattagagggcactctttttatggtgacagaagcccagcttaaactgtcatagaatttaccagcctatataagtaaatattcaactagattcagagccagtaggaatgagagtcttgaatgccaccaggaattcatttcttcatctctcttctctgcttctttcagcctgtcagctttattcttttaagactggcttcctacatttagttggaattacatttcttgatagttcttatgccttacaacttttatcttcatttttttctccgattttcatttgaaagatctcaaggacaggttctgattgagtagctttggctaagtgtccatcctaggaccaatgaaatgtggtctgatgggtggaggactttgattatgctctccctgcaatgcgatagtgggagtgtgaggagtaggaactctccaaaataaggaggatggtattgccattccagaagaaaggatactgaacagacaaaaccatgacacctatgatggtgacctgccataggtaagctgaatcaataatgccaggatcacctgctaaaataattattatttttttcttctcaaggaaacattaattttggagcatggttaatattgtcaatgatgtcttgctcacctttgtacttttcacaatgattaacatagtgccttaaacagaagaaaaaaataggaagagaaaaaacaggacaaatgatggatttctctttggggacaatgacatttattctagccattaaccccttattggacatcttcaggtgtttcttggttgcacttgctcccctttgctcaatccagaaaacacaaagaagccttttgcaggctattttagccgataggtctcagaagttgcctatgcactgcatcatgggtaaaatttgggttaaagataattgtaaatacggtattgatatcaactgatgttttcccaacattgcaataatgcttgttttgtttgttggagagtttattactttttgatcaatagaatgtgagatttgtgggtgaaattagcatagtgaataacaattaggcaaaaaatcaatgggattcagacaaatatgggacaattttctctctctgtctctctctctgtctctctctctgacacacacacacacacacatacacacacacactttaaaaactgtaaggcatcttatttacaattccaaagctctaggtggggatgggagtatatatggttcccatgaactagaaacaaataggtaccaagaaaccgtttgcagattctgttttcaggacacttaagatctttgtatgctgaaaaacctggaacatcaatatccattaattccttttgtactctcttcatttttagtttaattaagagtcactgaatcccttatctttatcacctctcgcctgggtgctgtggctaagaggtaaagcagatagaactctagttctcccatagtctcacttttatttcttttcttctttcaacattatttcattggtggccaaagcaaagcatttacatactatgccattgaatcataggcaatgaaattaagagagaccccagcaatcacgattcaaatcactcctaagaatgggacagaaatccctgaaactagagtttgtcctcaagcattcacttgcgtatttctaatgacagggaactcattacctcccaaggcaatccattgtaatgtggcacagctctgatggctagaatgtgttcccttatattatatggaaaactgttccctgaacattctcttattggtcctggttgtcctccagagtcaaaaaaaacaaaagaggaaaaaagaaaactgtgattgatttattgccttgtgagattataggccatttcctgtatttttttctttaagaaaaatggtcaaggccaactattatatcagtttttgaacatcactgtattctaggcactggagtaagaacttttcatacatgcatcatctcattcactcttacaccttagcacagaaagtaaaaatatgtacagaactcaaatacttttcagtatctgcatttacattgaagtatcaggatttcctctggctgttggatgtgaacagccttgaagggaaccacactgaaacatgttccatttcccttcccttctgcttgttggacagaagaagccacaggagtttggagaatgggaagaaaaacttccatttattttacagatttatttttctctggagatcagattaatgccatgattactgctctgtgcaccttgtatgtcctcaaagagatgaccccacatttctgtgaatgtccaatctgatgtgtgagccgtctttgactctttgttgaaagatggcaacctatctgcaaaggagaaccctctgatccagcatccacatcccgagtatccatccattctgagtggagggcattttcaagcttcctcaagaaacgcatgttgactgtgagctccttaaaaaccatgtttcttcttgtctcctgagcctctggaaaatgtggttcggataagttactaagtatatatttgttggattaagtacgatgattgggatataatacagttctcagctcttacattttgtggtgtgtctaagaattccctgagaacatcagtgaagtgtatttacagcattggttcaactcctggtggactctaacatctgtgtatcatggtatttgaggattccatggggttcgttgccatgtctgagaatcctaactatatatcatcctatctgataattccttatggaatatctctgtagctgagaatttccttccactgcatgcctgctcagaaaacagtgtttagaataatggtcctgcttggctctgaattgggctggttaataatcattgctggggaaatcaatcaaatctatgatatcttattacttacactaatttaatcacagggaacggatcactgttccagttcaaagggcaaaaattgtgtgtgtgtggagggggggtgtatgggggagagagagagagaagagagagattgaagagcagagggtacgttaagcaaagaaggtagtgaaaccctggagggaatgacctaatctctacaacatatcatatgccatattcagctgaactttaatttgtacctgaaagcatgttacttttattccaattgtattctgagaattgtgttctgaataatttttgagatcagagaaggcaattgctaattccctaatcatacaaattaactgagtatgatttttagtaaaattgctcacatgtgattactgcagccaaccaagctggctccatcctaggcaaatgagtagatgacagccagccaggatggagaccatgaatatgcaggatcaatgatggtccagtctctccaggtttatgagttagtctgtgtcaatcttgtacattcccttttatcacctttctgtccaccctaatctcaaatgccacagcctccatgaagccttttctgaagaggcccccaatcaggtgagagctcttcctcttcggaatttcactctcattttgtggctccagagtgggtgctaattacgtggtctaccccatctttctttctattgagcaatgccactctcctggtccatggggattctggtggaggttttagccaaagaccccgctcttctggcccagactggccagtaaaaaacccatgttcttggacacagaggttggtccgggatgagctgatcagaatcctcttttgattatcctgttgagtttggaggaggagacactcttgagattgcaaatagcaaagaccaaaaagctacagttttcatcctggcatccctcctgtttttgtatggctctgccttagtcctttggtcctgttttgtaaaatttcctatcttctcactggttctaatatagagatgatatttttttttttctcaagacccaagcctgattgattggcagagactgctgctggagtaatgtgttaagaaagagaccgggtcatgcctagggtcaaggtaatatgtagggtcagcaggaagagattgtgatctattagttatgtcttacatgggcacaggagtggttgtaaacaaaccaggtgtttgccatcctttatctagtgacatatcctatttcttctcagtgattggtatgagtcctggatttgggcaacaacctatttctatcacttgtcaaatttgtcaccaggaaagccacagtggccacctcatgaaccaggtcaaccagacttttgcccttcagactttaacattaattctttgggtcctcgaaggctgaagtcagtcagaagaataaatgacgctacattctgacaaattcaaggagtgtgcagcataggctgggaggcccaagattgtaggcccagggcagtccatgcagcaaattcacttacattagctttccaattcaatgttcaattgattacttttgtgtaatcatggtccactggggattttgtatgatcatttgtgaccagagaccatgcatgcgttttttttgctattgcatctcctatgcctggtacacagtaagtgctcaataatgtgttgaatgagggaataaataaatcagcaaattaatgtacaaactctctagctcatatcagaagtcaaaactgattcagaattgatatttatggaatactatttgagctgaagtagaaggatctagaaaggatacattcagtttttatatttaggatgtagaaccaataggatttggtggtaaaaaaagataatgctaggagaaagggaagagggcaagaagtctcccagatttatgactggagcaatgagtggctggtagtggcattcattgagatgctcttccaaagcacctgtgttggccttgtcataagaacttctcatactctatttttattggctgagtatttctcttcctttcaagccaggtagtacattgagggaggcactgtgcctatcttgtatagaattgcattcccagaacctagttcagtgctgggacatagcaggtcagtaataaatactgagtaccacacgtgtgttggtaccaaatagccattgatgatgatgaaccacttaataagtatataatgacactgtatttccatttattatgacaggggcacatgttacctaaaagcaacttccagtcacttgtgaaaaggataaggtgcaaaccttgtttcacatagctcagaactgtcctctggtctagtgtagacctgccaatctaccatggtattaaaatgcaaattttgtatgagcttcaattactgaaagtctatatgaagtttatgaggcttaacccatagctggttcctgttcacagtcaaaggccaatgaatggtcaataaaagctgcaaacagctttccgttattcctgatggatttctctgtaagatgacagagtgtaacaatgatcaatagtggaacaaccatttctgaaggcctcttgtgtcagatagaatatattgatatgaaggagggcagcatcaagttttgttggtatgtcagcctatggttttgggtaaacagaggatagctcctctttaataaaataggatagattatgtttgagtccttccaatagaacctggcacatagttggggctcaacaaatgtgcctgagataatcatctcggaagagttggtttaagagagacttattgagttggttaaggggaacatattggtgagtattggagcccagggattagttgtcactatgtcctcctcctgtccaggaagaaaatggatggaagtggcattttctactaactgaatgatgaagatagcttctttttttgtatttgttacagaaatgcccagtgctgtctggtctagtctgattttaggaggatcagaattgaagatttatccaaggatgctgctatgtgatgaacagagaatgtgaggactgctattctaggagggcacgcagtatcatctgatgtacaaatgtttaatttctcagtgcctcaagattttttgcagacagtaatgattggggagcaagtaaacaatggcccatttatagatatgagaggtctggtcttcgctggtcttcgcaggtttagtaatcatgtgctgttaataatcctaacaacacagttacgatcatttagacagtggttctcagtcctggctgcacagtagaatcagctgggaatcttggaaagtacaaatgtgggagtcccattctagaataagagctctgtgggtgggactgggtatcagattttttttttttttaaagcttctcaggtgattgtaatgcacagccagggttgaaaaccatcaattggcccaatagagaaatagtgaaattcagcagacactgttattttctgactctattgaggtatcattgacaaataagaattgtatctatttacagtgtttcatgtgatgttttgatatacatatatatgaaataattactgtagtcaagttaattaacatatcaatcacctcacatagctaccgtgtgtatgtgtgtgtgcatgcatagtgagatcttctctcttagcaaatttcaagtatacaatgcagtataaattaactacagtcatcacgctgtacatcagatacctagagcttagtcattgtgtgtaactgaaactttgtaacctctgaccaatatctctccatttccttcaaccccagtccctggccaactactattctaccctctgcttctacgagtttgacttttttaggaaccacatataagtgagatgatgcagcgtttgtctttctgtgtctggcttatttcacttggcctaatgtcctccaggttcatccatgttgcgcaaacacttttttgatggagaaaaactgttttatttgatgactaactaggcagtgaattcctttaaatgggattggaaaatctttagaattagatattgttaactaaataataggtagctggactttggggtagctgatttcattgttgtctatgccctaggaagggaacaatataaaaattaatttgtcccttgtccagacactggttgcaatcattgcctaggattttcaaactttgaggaaggctgacgagcgtatggtgattaactggcatactatagatctattgagaatgcttcgaagtatgtagcttctcaaggaattctaccccagcaagacacaggggaaggctgtccttgggtgtgggaacaagaagttggacttaggagttaacacttcagatggtaattggaggggtagctttcaaagcctctcgtttttctgaatcaaaaagagaaatggttggtgggaggaaatggccctgtgctggttggcatacataggttaagagaaagaggagctcttgttgcatgtgactccgtggttaactttttatatggataattgttagtgaaaacccccatgggatgttagtagctatgacttgatgctgtggacagccagccatcacagataggttcctacagggctttgctgtgggatgaggatggctcaccaccctgtaactggctcttaaaagggagccacgtgtaacggctgatcaaagtagcaccaagaagggctgatatttatttgttaaagagagaactaaaattttccttgtcatttgtagaccacatttttttttaaaggcctgctggatctgagaatatattttttggctactggttttacttaatattattattaatgggtatgatgggaactaaacttgtttcattattttaagtaatcaactggcctataataaagagatattaccaagtaagtattattcaataaaggaaaggattgtttctattaaaaacatgagtctgtatatccatgatcttgtgtatgtgtctggggttatgcgtctttcaagactctcagaatgggtcagttcattcttctcgtttgactaatgagtctactgagacttgatgggagtatccagagagctattaaataatgtggaaattgagctgattcattttctttctttctttctttctttctttctttctttctttctttctttctttctttctttctctttctttcttttttcagacagggtctcacactgtaattcatgctggagtacagtggtgcaatcatggctcactgcagcctccaccttctgggttcaagcaatcctcccgcctcagcctcctgagtagctggaccacaggtgtgcattgccatacacagctaatttttaaaaagtatttttgatagaagcagagtctcaccatgttgcccaggctggtctcaaacttttggcctcaagtgattttcttgctttggcctcccaaagtgctgggattacagctgtgagccactgcgcccaacttcattccttttccctagaggattctttgcagggaggataagtgaaggaagaatcttgctgtgaagcagaacctctatgaggtcacacgatgatggctctctgcagtatgaacagagagagagagagagacgaaagggcaatcactgtccattctccctcccattgctcctgagacctcttctttacaatcaggcctccgtgctgctgccctccttgtgctgtgtctctttgtgtgagtggatgaagtgactgaaggcagatccagggagcagaaaagaagtcatgaaagggaggaccagagggtgtctagaagggcatctactagtcatttgatggcctgtgcgtatttggatagaatccagagaactattaaaagtgcttcccaagagagccagattgcctgggatcagatctctgttatgcctcttattagccatgtaatctcaactcttagttttcccatatgtataatgggatggtgacaacaatagtcaacctcatagggctattttgagcgtgaaatgagatattacttgaaagtgtttagaatagttccaggcacatagtaagggttcaacataagctagttattatggcttttatgagattagctgagaaattcaacatctatgacttcctaaggtggatggtcattcgttcgttcaacaaatatttgctgaatattactgtgtgtcaggtctcatgccaaatactcacaaatgaattacaaatggcctctctttgaaggagcaagaaggactggtttgttgtttatcccaggaatactccagcaagcttgtacaacttgccttattttgttgttgtagttgttgttttgctttgttttgctttaggcttttcacagcctgaagccatggtttttagtttctgtctctagtgataagtggaaatgggggatgagaaagggctttactggcccaaccagaaagagaaactaagaacccataagtgtattctctcccttggatacccctaaggggtagacaatcaaaaagaaagaacggcaaaagaacagtgtattcagcagcccaaatgcacatggaaacctctcatttttaaagaggatgaagccgtggaggccggagcttctctggggtctggtgtcatgatggtcacaccagcagtagcagcctgtgggtggggaggggacagaatgaccccaggcctttctctttcctgtaatctagatgtgaggcttgtgaagaaatttcctaaaagcagcctattgaactcaagttccccatctcagtctcagagaagtgggaaatagggcctcctttcacagactccaagggcaggaattttcgcctttctcatgcaacaagcagccagctccttcaggcctcatagaagtttcagctactgactgaggctggtttgggataagaaaaacatcctctgctgaggtctcatggggcctgggtcaatggctctgaactgcagggagcttcgtgggggcaggctgctgtggtcctagcttgctttagattgtaataattagagaatctatacttggcagaggtgagctggatcatggagataatttcgttcaatcctatcattttgcaaagataatcctttacaactagagaagaccaagttatccttattctctgcccagttctgttccttactcagcaaaaatctcttctctctactaatagttcataggtctttgtccaccaaaagtccataaggattctgcctgattcatttgcatatgactcatatgctaagagcttcgtaccaaaatgttaagtgtaacatatttgaactacactgtgatatttcatcaagagttgccaaactatagcatggaatatacaaaaatgttcacttcaagttattaaaaaatttgtcctttattacttaacgtaaagttggagtccattataggaatcatctctatcatcaccattgtacccatcatcatcctggtgatccccacggatcatcagcagcagcatctctgtcatcatcatcatcatcatcatcatcatcatcacaacagataacattgctagaccagtggttcttaaagtgtggtcctacatcaaaagcattagcattacttggaaagttgttagaaatgcaaaatcttagagcccattctagacttaataaatcagaaattctggagtcaggcccggaaatttttgctttaacaagccctccaggtgattgtgagttggagaaccattgtgctagactgtgccaagggcttttaacaccttatctcacttattccacagaataacccacagtgataagtaccattgttgtcttcattttaagaaaactgagacagagtgaagttgagtaacttgcccaaggttccacagcttgtggcatgaggcttagctagagcctgtaatgcatttactttgttgcacataatacattttcttctttttaatttaacttttaatttattttattttatttttgagacacagtttcactctgttgcccaggctagagtacagtggcatgatcttggcacactgcaacttctgcatcctgggttcaagcaattgtagggcctcagccacccgagtagctgtgattacaggtgtgcgccacaacacccggataatttttgtattattagtagagacagggtttcaccatgttgtccaagctggtctcgaactcctgacctcaagtgatccgcctgccttggcttcccaaagtgctgggattataggcgtgagccgtgcgcccagcctaatttaacttttaagttcagggatacatgtgcaggtttgagaacacaatatatttccagtgaagtcaatatctgtgactctgcttatcctaaccaattctatgaactacaaaaaagaagagtagtaaatcctttaacagccaatccctaacaatatcatggaattgcaatttatttttactcagcttcatcttatgcagtctataaccacaggcttgaggtggtgacatgccttcaaatcctgcttcatcttcccttgaagtaaagccaaagatgatttcctgggcagaatgtggccaatgaggtctgcagcagagagaacaggagtgggcagagggggatagggtgggaccagctgcaaaatacttcctgagtacagaaagaagggatgaaggagaaatgaggccagaagagaaaataagttaataagcagagaccactattcgatgaaacaaatactgtgatatccattgtactgacaaactaaaacctggggaggttacatgacacatgcgataccagtaacggggaaacagatgatctgggatttgacattggtgtttcgactcttaatccagtgcttattctactatagcgcaactggagcaactgaagatgaaaaccagccatatgaggttatgatgagacacatgtgggaacatatgcccttcttggagttcataaaattccaggagttgaatgaacccaccgaaattgaatgcaaagttatgatgtcgtggtgtatgtgtttattttatacttatatacacatgtgtatgtgtgtatttgtgtgtatatatgtacacacacaggtatatacacatatataaatctgtattagtcagtgctctccagagaaatagaaccaagaggttctatatatatattttttgtttgtttgtttgtttgtttgttttgttttctgaaacggtctcactctgtcactcaggctggagttcagtggcctgatcttggcctactgcagccttgaccttccaggctcaagcgaccctcctgtctcagcctcctgagtagtgcaccaccatgcctggctaatttttaaattttttcatagagatgaggtctcactatgtggcagagtgatagatctcattatgttgcccagtgggcttaagcaatcctcctgccttggcctcccaaagtgttggaattacagtcataagccaccacacccagcctgtaatgagattgacaataaggaattggcttatgcaattatggaggctgagaaatctcatggtctgccatctgcaaggtgaaaacccaggttagctgatgtgtagttctagtctgagtctgaaggcctggcaatcagcagaactgatggtgaaagctccagtccacgtccaaaggccttagaaccaggtgagctgatggtatgagttccagtctaagtgctgcagaagactgatatttggctcataaacagttgagtggagagagtgaattatcccttactctgtttgtttttgtgctatttgggcctctaatggattggatgaggcccacccacattggagagggcaacttgctttactcagaatactgattctcatccagaaatatcctcacagacattcccagaaataatgtttaaccaaattatctgggcaccctgtggcccagtcaagttaatgcataaaattaactatctttctctgtctagtggagagagagagagaaaaaaaaaagagagggagagaatgactttcctatttctattcccatatgggtcgtggtagattgcattattccaaagatggccgcttgcgcgcgcgctctctctctctctctctctctctctctctctctctctctctctctcccccccctccccctccccctccctttctccctccccctccacgcactccccatctccctctctgtcccttacaatctaatcagcagtcttcctacttagaggtggggtttgtgttgctttttccctaatttggacaagggttgattaaagctccaacaagcagataatggagaaaaatgatatcctgtggcttccacggctgggtcatcaaaaggatacagctccttttctctgcctacacacttgtccttggaaaccagccacagtgctgccgggaagcttaaatgagcctgtttggagggacgacaggagaggggctgagatctccccagtcgacagcgagcatcaactgcccctgtgtgagtgagcgtttgaatggtcccagcctccagccttcaagcctgagaccccagggatggtgcagcagaatcaagccatccttgctgtcccacttggactctgacctacagaatctgagagcacaatgaatggctgttttatgccactgaattttgaggtgatttattacacaaccctaataacaggagcactacttccaatctttttcccaccctgtagcccagacgttctttctaaaatgttactgtggccctttcatggctcagatcaaggctgttctgtggatccctattggccacaaggtaaaggtttgtgaaaggaagctctctgcctattttctcagtcttggaactttgactatatctggccgcaaccacaaaacaccaattcagacctatggagctgctttgggttccctgaagccattagtttcccaaacctgtgtctgagcaataaaacacttagtcatgaagcagttttcacaggtttacagcgagaaaggctgaaaaagtagaatttaatttttatggtaagattttcttttaggtaaatctattaagttattagaatggtttccatccccaaccttcttttttacttcctaaaattcacgtttttttctaatttttttggtgctaaaaatgtcctctccttaatgaaataatgggactaccttgtttcctgtctctgctcctgctgtttttctgttaaagtccttactaggcaaaataaaaagttggtcactaaatgctattccctcaattaaaaaaaaaaatcctgtacttgaaataaaagtctgggaaccactgacccacatagtgtagtctaaaccacttagcatggcattaaatccttgatgccatattagttaaattctgttctaattgtatgataattgggtccaccaacaatgtgattccacactatgcccctcaggtaagtgatgaatgtctgagaaaattgggtgcttggtggagcattatttctttgagaaatatgtctgaaggcacaaaccattgacttaggttaagttttaaaacactgcctcctctgaagttaggcgttgctagctcataaataattaatacaaaccatatagccactcagacatacatgtgtgcatacctacatcacacatgtcatcactcccacactcatattaacttcatacacccacactgatgttaaaatgcctgcacacccagacaaacatggcagctggagagatacagagttctgcaagtgatccagcgaggtgactaagctaagctgtgcttcccagttcccatccattcccatggagatccatcaatctccacgtatctgctttcaggagctcttttccccaaagtccttgaaataaatttgtagcctgatatttgagaatggccagtctgagttctacttacataactcacccatgcccttgacattcccccttggatttgtccatgcacagctgatccatcccctggaccaggacaaggctacagctcagaggccctctggtggagaaaatacttgtattttttttttttcctggacttgcagctatctggtcttgcttcagttaatcagtttcctgccacctagctgggataatagttcatcttgggtttgttgacctctgtctcttccagttgcctggtgtttggtgattcaaagggtgataaataaacaggattcataatcatagcatgcatgattaggaacactttctgaccatttcaatccaatttgcatttaggtctggttaacctgaggggcaggcatgttaatctttacacaatacggattgattactgacttctcaaatttttcctccttcagatgacaagccccagcagcctgaaatttgtcaatttaagatagcacccaaggagcacaacaaacctactttaggaaaaaaaattaacttggaataaatacattacttccgtgcagagcaagaacataaagttataccccagggacaggcaccacctataacctactgcacccctgcaatatcttggtgcctcattagatttattaatgaggctggcacatcactctacccagccctattgtttaataggatcggtggacattgaccagcacagatgataaatttgagagaggctctatcagcataaggtttgggactggggaagcagatggaaatgttttcccttgacctcataatcctttatgtgtcttccttgtgatgacattgtattatttaaagtgcacaggatctatagcacctccttggaaatgtctaggaatctggggatgagtctgtgacctccatggaaaatgttaggaattctatccagatgtgcaggtttctttgctctggcccatgcttaaccatggaactgcaaaaacaggaaagccttagaggtgtttgtgatatcataaggtacttgcatttttcaagagcataacttggactttacatgcctctaaccctaactggcatctcttatggtgcttagcaggtgcctacagaatgtttattaaatagatggactttggactgttcaggggcttgatgagttccttgctatcagttgagcaaaagtagtagaggatgttttattccaagaaggggaacctgggtggtctctgtgtgtgtgtgtttcttttctatttgcttttccctatcatattgaactcattaccttcatcggggctgttaggacagattcctgactattccccctctccattggaggtcacttctcatcttgcttccttgatttccacaagaggaagttaacattatcctgagtgtgactgtcctgtggcatttggagccattcttaaagtacaacactggattatttcatcacaagcatttgccaatgattataatcgagggatcatgacccctcagtctcttttacaatgcctctggagagagataacattcaaggaggattgcttgcttcaaggacctgtaatctacctcttcttccaagtattccaaattaaaaaaaaaaaaaaaagggaaatagagagctgagtacttggacattgtgctggttccctttagatctgcttccatggaatggtcctttgatagaatatattgaggttctgataagaaacagatctattaagttatagttaagtccattttaatgatactattaagtggtgtttattatagcataccttgtattctttataaagacttctgggagatatttttatctggtttcagtgccataaaaggttggctaattagcaaagagtaggacctttacctttatgagcttcataaactttcgtaagcgtttagtttgtgtgtgtgtgtatgtgggcatgtgcatgtgcttatttcaaaaaatttccaaagcaatgaaatgaaagagattttccctgaaagaggaactattattcatccttgaaggcctatcttaactatatggccttgagactttctcagtggctgctagggaggtagaaacttctgcctctgggccccgggaccactctgttctttaaagtcatcagttgcaatgtgcttggatttgtgtggccatggctgtcagccccactcacctgggagcttgtaaaagacaagacaaggccttctgggtagcccccagaacctcaaacacgggaaggtgcattgtcacttagacattttacctcagcctcttgatcttcactgacttgtggactctcaagtatgctttgtctatgtgtaattttgtaatagagcgttggaagagagactggcatttttggataaattaatctcttagtgaagaccttgtagttctatttattctttctagtgaaatgtgtgtgtgtgtgcgtgcatgcttgagaaggagagagagagagagaatttgatttattaatcaagacatgcttcagttactgaatgggaagaggaccaagagtctttgggcttataagttagatttgacccacacatttacaatgcttctgcttcaagaacaaggtgctcttttatattcttttcttaatgaatctgtgaccaggtcattctcatttttggattttagaacaggtctattcgagataaaaactgtgcccctgaggtttgctttctaaaacacaggtgtttcagatttttttttttttttttttttgctgatttggttttaattccgtcctttctttaaccacatcttttttcctttctaggagcaatacaaagttcagacacgttctgaggttgagttttggtgactttagcagaaagtcagaagaaagctgacaatttccttttcttcagtgatgtgcatggtttccaggcctttctctggacctatgattcactgccatggagtggaactttaacacccctagactgtggaagctcatccagctttcaacagtatcacctagaggcaatgaaaagcaatcagaatcacagaccaacctcatgccaagagaatcttcattcagttgtggtctgctttgtactgcttgagcatttggggtttgaaaaattaaggaaaagaatagggggaagccccaagatgaaaatactggttttcttgccaatgttttaaaagcagctcaagacttaaatttgagttgaaaatttcttatagcaaatgtgacttttgggcttctaaaaacaagtcatcctggttatgcctggttgttgaaagtctgcataattatgttatcttatggacatgtttgtatctcttcaaaattcatatgttgaagccctaactcagtgtaactatatttggagatagggacttaatgaaataacgaaagttaaatgaggtcataagaatggggccctgattcaataggattagtgtccttttaagaagagataaaagagagagctttccaccctgtcatcccccttccagctcccatgcagagcatgcacaacagaagagatcatgggagcacagagagagagggtggctgtctacttgtcaagaaaagaggtctcagaactcatcattttttatggctgcatagtattccatggtgtatacgtgccacattttcttaatccagtctatcattgttggacatttgggttggttcctcacttttgttgaatttaataaatttgaattttaaaatctaaaaaaagaaaagaaaagaaaataggtctcagaatgcaacccacattgctgccatgttgatactggacttctagcatctagcaatgtgagcaatacatttctgttgcttaagccatccagcctgtagtatttacagtaccccatgctgactaatacattaatcttagttagagaatctgctatttatagggcaataaatgtgtccaggcttggtaattagagagacgggggttaaagtcttgtctctgccatttgtttgctgtgaattttaggtgcattttcttgcttctgagattgtattccatcatatgtaaaatggagattttaataagaccttcagtgtaaagattaaatgagataatagataaaaatgcaaatataaatgagggactagcatagttgataatctgaccaataccatttatcgaatgtctgcctgagcatagtagtgctatcaggtttattttgatgtggccacctcccagaccctcacccccacccagaattggaggcaggagaattgaaatgggaaatatctttctgattacccttttcctcacaaattgtaaccaaaaggattttcaaaaatttcccctaaattgttatggtactaccttagggcaacatgctttatggtctagctgggttattacgaaaaatatatttaatttttttctccagatccctggagaaaggagatggtactttcaaacagaataagagaactttgaagagacttaacaaagggactagttccaaaagtatggtgtggatttaaggaaataacaagagatagtgcagtattctgaagtatccaatgaggagctgttaccaccccgggtctaaagggtcaaggggagggaccagccactagaagtagataggataactgtacgaatagggaggtttgactcgagctatgactagtagtggaagaacacaaccaacttaggggcaccctggccatgagggagctgaggaaacaaatattcaacttcactcttctatcttctgatctcttcctgtcctctcattggctgaacccaaccagaaaccatggacactctggttcatacactggttgatggacgccatatgtgttagtcccctggggaatacccagcaaactggagacagtggacagtctccactgaaattgggaggttaatgcaagctatccaggacaggagtcttctcaatacttctcaacttctcagtatatatatagagagagctctatatttgatttctccatatttgtttcttgatatgttaaaggaatatagaactatagtcaatgataattgtacatttaaaaataacagagtgtgattggattgtaacacacaggatacttgaggggatggatgtcccattcttaatgatgtgattattacatattgcatgcctgtatcagaacatctcatgtaccccataaatatatacacctgatgtgaacccacaaacattaaaaattacaaaaattacaaaataaaagaatatagaacattttctttgtttcccccaaacaattctcaagtttaatatttaccctggagtgatacatttctaccttggagcagaaggctgcaaggacacgtgatttaagagaagaatgtacagacacagtgtttgagaaatactttctgcattgcactgacttgtcctgttgactcatccatggctgtgggtcctttaatcatagttctctggggccatccatatggccatatctctttgtcactggagacaaaagactatttgggcatgatctccccctcctttttgaactttttttttttttttttttttttttgagatggagtctcacactgtcacccaggctggagtacagtggtgtgatcttggctcactgcaagctctgcctcccaggttcacgccattctcctgcctcagcctcccgagtagctgggactacaggtgcccgccaccatgcccggctaattttttgtatttttagtagagacggggtttcaccatgttagccaggatgttctcaatctcctgacctcgtgatccacccacctcggcctcccaaagtgctgggattacaggcgtgagccaccgcgcctggtccctttttaaacttttaaagtttcagataattatatatttacatgcagttgtgagaaataatataggaagatcccatgcattctttacccagtttcctcaatgatagcatattgtccaactacagtataaatcaccattgggatattgacaaaggtacaatccatttatcttattcattttttttagttttacttgtacttgtgtatatgtatacttagttctgtacaattttatcacgtgtgtaggtttgcatgtctatcatcatagtcaaaatacagaatagctcaatcactacaatgatttctttttagttattttaaaatgtacaattaagttattgactatagtcaccctgttgtgcaatcatgtatgtcttattcattctttttaacatttttgtaaccattaaccatttccccctctcccctcaccccccacttcccttcccagcctctggtaaccatccttctactctccatgcccacgagtaaactgttttgatttttagatcctacaaataagtgagaacatgtgatgtttgtctttctgttaaatgaaataatccaggtaccacaatgatctttcttttttgtggggtggcggggtggggtttcactggtcacccaacctggagtgcagtgccccattctgggctcactgcaacctccgcctgctgggttcaagtgattttccagcctcagcctcctgagtagctgggattataggtgcctgccaccaggcctggctaatttttgtatttttagtaaagacgggatttcgccatgttggccagactggtttctaactcctgacctcaggtgatctgcccgcctcggcctcccaaagacctgggattactggtgtgagccaccacaatgatcttgatgttcttctatcacatctatttctttcctaacgcaccccatttttcatccttaaccccccggcaactaccactatttctataattttgtcatttctagaatgatacatgaatagaattatacagtatgtaaccactaggattggcgttatttcactcagcgtgattctcaggaaattcatccaaattattgtctctatcaacagttcattcctttttagctgagtattattccatggtatggatgtaccactgtttaaccattcacccattgaaggccatctgggttctttccagctttttgctgttatgaagaaagctgttatgaatattcatgtacaggtttttatagaaacataaatttctatttttctgagataaatatttaagagcacaattgctgggatgtatggcaattttatgtttggatatataaataactgtcaaattattttccagagttactatgtcattttacatctgtaacagcagtgtatgaatgatcctgtgtctttgcatcctttccaaagatcaaagacaagcatttggtcttgtatcaagtttttgaattttttttactcattctgataggtatgcgtaatatatcactgtggttttagtttgcatttccctaatggctaataaagttgcatatctttaattgtgcttatatatcatttgtataccctcttcagtgaaatgtctgttcatgtcttttgccaatttttgaattgagtgttgttttttactcttttgataactctttgtatattctagatactaatcctttgtcagatacgtgatttgcaaatacattctttcagtcagtaccttgttttcctctcaatagaatatttcacagagcaaaagtttttaattttgatgaggtccaatttattattttcttttctggatcatgcttttggtgtcaaacctaagaactctacctaagaacactttccctaaccccaaatgccttaaaagtttttctattttccccccaaaagcattataattttatgttttacatttatgtttgtgaacaattttgagttaatttttagataaggtatgaggttcaggttgatgatcattttcgtttgtctactaatatccaactgcttcagtataatttgtttaaaaggctatcctttatttaattgcttttacacctttgtcaaaaattaattgggtacattcatgcaggtctatttctgggttttctgttctttcccattggtcagaataaattactatagctatacaggaaaccttaatattggtagaataataaaatgaaatgaaacaatttattcttctttgttcaagattgttttagctattatagggcttgtgcctttccatataaattttaggataaacttgccttactgtatacacacacatgcaccccttatgagtacaggcatatcttgttttattgtactttgatttattgtgctttacagatattgtgttttctacagattgaaggtttgtgacaaccttgtgtcaagtaagtctcttagcgacattttttccaacagtttatgctcatttaattagcatttttaacaataaagcatccttaaaaattaatgcataatatgtgtacacattttgggggtacatgtgatattttgatacatgaatataatatttggaatattcatctctttaaacatatatcttttctttatattgaaaacattccagttcttttcttctagctattttgaatggtacaatacattattccgaactatagtcactgtcctgtactattgaacaccgaatcttatttcttctatctaactgtatttctgtacctattaaccatcctctcttcatcctctctcttcgctacccttcccagccgaaagtattttttcactaaggtgagtacattgtttttaagatataatgctattaagcacttaataggttgtagtgtaaacataacttttatacgcactaggaagctaaaaaatttatctgacttgattcattgtgatactcactttatcacagtggtctaggcctgaatctgtaatatctccaacatatgcctgtatttgataagaattacattaagccaacagatcaatttggggacaattgatgtttttactatgtagtgttttctaatccatggacataagtatgtttccctgcttatttaggtcttacttgatttccttcatcaccattttctaacttcagcatgtcttaagtttatacctgaatatttaattgctttggagttttttatttcagtttacacatgttcattgtcaactttattgagaaataagactgatttttgtgtgttgatcccttatcttgtgatcttgctgaactcatttgttaattgtagatttttttttgtaaattctttgagactttctagattaaaaaaaagtcatctgtaaatagagacatttttatttcttctttctccaatctgtattcctttatttctttctcttgctttattgcaatggctagaacttccagcactgtgttgagtaagaatgatgagagtggacatacttgccttgttcctgatctgagggaaaaaagcatttaatattttactgttgagtatgatgtgatctgtagaattttctgtggattctttttatcaagtagaggtcattctgttcaattcctagcttgccgagagattttcttttacatgggtattaaatgttatcaaatgtcttttctatgtcagttgatatgaccatctaccttttctcctttagactgttgccgatattgtaaattatatcgattgcttttggaatgctgaaccaatcctgtgtatctagaatacatttcacttgattatagtgtataactgtttttatagattgttagatttggtttactaatattttgttgacgacgttggcatcttcatgagagatattagttttccctttgtactgaccttgtctgattttgatatcaagataatattggcctcaaaatgcattggagactattccctcctctttcattttctggaagagattatgtaaaagtggtgtcaattcttctttaaatttttgataaatttccctagtgacaccatcagggcctggggattttttttagaacattttaattacaatgtcaattactttaatggttatctactcttgcagattatgtatctattcttggttaagttttggcagttggagaaattggtctgtttcttcttggttgttaaagttatgaacataaagttgttcttagtattcccttattaagttttgagagctttctttaaccatcctttaagggtgagactgttggtaacagattctttcaaagttttttcatctaagaatgtcttttttccccctcttattcctgaaggtagtttcactggatatcagattcacagttgatagttcttttcttcaacataaaaaagtgttgtgacactttcctctgacctccatggtttcacatgcgaaacctgctattatttgagttggtgttctcttatatgtaatgcataatttctttctgattgcttttaagatttgttctttgaacttatttttcagaagtttaaccatcatgtgccttgccttgaatttctttgggcttatcataattgcggttagctcagcttcttgaatgtttatggctttcatccagtttgagaagtttttagctcttatttctctaaatactttttcagctccatattctctctcctttccttctacaaccctgatcatataaatgttagatcttttgttactgctccataggtctctgagtatctgttcattttttctctattttctcctttttgttcaaattgagtaagttctatttatttcttcaagtttactgattctatctctgtcatatccacttaatacttatgactctagatattcagagtgaggtgtggcgcactttggtagtgaaggagctgaagaattgaagtggccaaattcactgtcttttcaattccagagaaaatatcaatggaggaagagattctcctacctccctggatacataacacctttaggatgtcaacagacattttaaaagctgttggtgtcagagagacttatccaggaagtgataaaggtggcttgtgagatctggaagctgaatattgttaatgaaggataaagttctatacggaaacatacttccaaacacattactcatctatttatgttctctttgcttgataatttggagcttcagtcatgtttttagggtgaatactatttacacattatttcccattgctgccatggttctattttcagggcaaagaaattccataattgggattatagaagaagaaccagcagccactgggaaaaccagaatgttcctcagatcaataaatgagctaatatttgaatgagtgagttatatggtttggcactcggtcccaaggcaaatctcatcttgaattgtaatccccatatgtcagaggagaggcctggtgggaggtggctgtatcatggcaggagatttcccccttgctgttctcttgatagtgagtgagttcttatgagatctaacagtttaaaagtgtagcactttccccttcgtgctctctcacctgccaccatgtaagacttgccttgcttctccttcactttctgccataattgtaagtttcctgaggcctcctctccagccatgcagaactgtgagtcaattaaaactcttttctttgtaaattacccagtctcaggtatgtctttatagtagtatgagaatggactagtatagtgggctaagagtggcatagaacacatggatgttttgggcatgtttctgaagatatttgatagagggaatggaaggtggatttgatcaatcacttggggcttggcagatcatatatgtatttattttaaatatactgtacatgaagcttctctgaccagaaagacatatgccgtcattgaaggtattatgtgagaacatgagctcttaagttgaaatggaaaatacaacatttgagcttgcttactttcaacaatcgagaaaagaatagagactaatattgatatttcaaacgttacggaagtgtgtgaaattaaaaaaataaacttctactcacagttcccatgttgctaatctactgtcatataaccctctgtggatcttttttcagcctattaattttatgtgatcccagtatggattagcatttcagttcatgatggttcaagacttatctgatctacaattcccaaagctaccttcactacttatccagatagaaagaaatacattattatgctttataggtgtattagtctgttcacatgctgctgataaatgcatacctgagactggatatttatacagaaaaagaggtttaatggactcacaggtccatgtggctggggagggcttgcaatcatggcagaacgcaaaagtcacatcttacatgacagcaggcaagagagaatgagacaaccaagcaaagggggtttccccttataaaaccatataaaaccatcagctctcctgagacttatttactacctggagaacagcatgggggaaatcaccctgccatgattcaattatcttccacttggtccctcccacaacacgtgggaattatgggagctaaaattcagtaggagatttgggtggggacacagagccaaaccatatcaatacacaagtatatagcggggaaaaaacagaactcctatagacatagacacaaagaaatgcatagctctgtgtcacaaacaaataatacctgaaaatggaaacagaacactcacaaagatattgtgatatcagattattatctgaatattctaatctttaggtcagagctctttatcccagcaatcctagtattgagaatttatcctaagaaaacaatctttttttttttttttttttttttgagatggagtctcgctctctttgttgctcaggctggagtgcagtggcttggtctcggctcattgaaagctccgcctcctgggttcacaccattcccctgcctcagcctcccgagtagctgggactataggcacccgccaccacgcccagctaattttttttttttttttgtatttttttagtagagacggggtttcaccgtgttatccaggatggtctccatctcctgaccttgtgatccacctgccttggcctcccaaagtgctggcattacaggtgtgagccactgtgccaggccagaaaacaatcttaaagtagaaaacacaacttcatgcctcaagaaatttattgcagattattaataacagcagagggtaagctgtatcatacatgtacagaagttgaatgcttatgtcgagtgcattgtattcatttaatgatgtactagcaaatgatcttaagagcatgccttactccatttatgcttctataacagaatactacagactgaggaatgtataaagaacagaaatttattttaccacagttctggaggctgggaagtccatgatcaaggcactagcagatttggttgtctggtgagggttgctctctgcttccaagatggcaccttattgctgcatccttcagaggggagaaacattgtgtcctcacatggcaaaatgcagaagggcaagcaggataaaatccctcagtcgagccctctcatgagggcatctaatcccattcactagggaggagccctcatggccaattacctcttacaggtcccacctgttaacagaagcacattaggcacacctgagttttggaagagacacattcaaaccacagcagagcacaaaatcagatagacctgggctcaaattctgactcctgtacgtacctgggtaagttataaatttgttaagcatatttccttttgtattatataaaatagaactaattattccttcttcacaaagttattgtaaataactaatgaaatatacatataaagcagatagtacaatgtctggaagagaggacacatttggaataggtgtttgaaaaatacagcttttgtcctgctgcttcttttataaataaagctttattgaaacacaaccgtacccatttgataccaattgtctatggttgcttttatgctacaataacagagttgggtgtttgttacagagagagcatgatctgcaaagcctaaaacatctatcaaatagctccttaagaaagtttgccaacttctgatttagttcatagtaatgatttcacaactataaaaggtgttttgtaaacaatagcaaaataaaaaataaaaactaggttatatgcttaatggaaaaaaataacctaaatctatactcatatttgatagttaaaactatgttgactttataactgcttatacagcacttaaaaggaagagaaataaaaccgattcattagatttaaggaattttaagagatattcctcttacaaatttattgtttttaaaaaagtagaagtgcaataacaattatcattgaaaaatcatgtcacctcttaaagagttcaggaattcaagtcctctctgggtgtggtcatgagtgtctctagggaaatataggcaacttcaattagaaattctctggcctatgtggttgttctcaaggttcaggtgtctactgatcagagggtaaaatgaagttccttctttactccctttccagctccttcagccagagccaaagtatttctggctatagggcttaggcttattagaaatgcaaaataagtatctaatagtaggctttttaatagaactgttcttagctgtcaaaagcaaatttatattaccacattgattagttgctgaagacttgcaaagcttctatttctgatgggattgggactgactatagttaatgttttttttttcctgttgtgttgcatattccttgtttcctgctctgtgtgtatgtgtgtgtgtgcatatacatgtatatgtatatatgtaatagttcacacatatataatacacattgtatatatggtatatatacacttttaaagggattttaaaggcatttttatggttaggctaattctctttcctcttgaatttttttcatagcatgttttatataaaggtaaaacatctaattgacttaatagcaagtttatcttttttttttttttttttttttttttgagacagagtctcactctctgtcccaggctggagtgcagtggtgcgatcttggatcttcactcactgcaacctccatctcctgggttcaagtgattctcccacctcagcctcccgagtagctgggactacaggtgcaggccaccatgtccagctaatttttgaatttttgtatttttagtagagacagggtttcatcatgttggccaggctggtcttgagctcctgatctcaagtgatccacctgcctcagcctcccaaagtgctgggattataggcgtgagccaccgtgccaagtttctttcttaaacccattttctttttgttatcattatcatggctcagttttaggtgtaacttttgatcttttctgcctagactatcccttttacatttatcagagtattctttatttaaaaagtccattatttctttaaatatattttatgcttctttttctctctcctgtccctcttgaaatccggttacacatgtgttggacaatttcatattgtcctgtaggtcactgaaactctgatacattttttgtttaaaaaagtaatttcaactttcattttagatccaaggggtacatgtgtaggtttgttacatgggtatattgcataatgctgaggtttggggtacaaatgatgtcatcacttaggtactgagcatacccagtaatttttcaagcctcacccctcactgttccccactcctatagtccctagtgtctattgttgctaccttgatacatttttcaatcttttttctcctctttaaattggataatttctaagaatttgtcttcaagtttactgagccttttttctgtaatctccagtttgctgatgagcccatcaagttatttttttcatttcagatgaattttctgcttttggatctctatttcattctgtttcatagttttcatttttctttctctgatgttccccatttgtttcctcggtttcctttaaattattgaatatatttatggatcttttcctgctaatgttagcatcttaaatgaggtctttttgtatttattattgtctagtattgtccagctttcctgcttcttcacatgtctggtaattttttattatatgctgaatattgtggattactcaatagaagttggatcgtgttgtcttcctttaaagagggttgacttttgttctggcaggaagttaatggactggtggttctccttgatcttactgagtcttggttttcagctttattaagtgggtccagaatagcccttactctagggtaagagttggcaagcttcggtaaaggaccagatagtaaatattttaggctctgtgggctacatatggtatctgccacatattcttactcattttattttatgatcctttaaaaatgtaaactccattcttagcttgtgggccatgcaaaaggaggccatgggcttgtagtctttctggtgtgtcagttaaatatctagggtattaatgagggctctgtactctggctggactgaaataccatctgtaagcactgggtgaactctagtatttctgttccactctcaacccattggcagctactttctgctaggtcccatggagccttgctctgtactttttcacctgaactcctagccaaggacctgcaggacactcccactcagacttctggagttccttcactctattaccatgctgcacacagtctaactggttcagttaatttcagtagctgcctctttctgaatttcggtggctgcctctcccattcagtaggaccatcctgctctgctaaagcttgctacctatgtgtgccatggttaggaaatttttcaaagacaaggatcagagatggatttagacttctcttcctatgtttcccctgcctataggccaatgtctggaaacaactgcctcagctatgcctccgtttcatgcttacttatcacaagaggtcaagtctggtactgattactgtgttagggctggagagggaaatcccacggtggtattttagaaaaccatttgacaatatcattctcatgcttcaagtccttgaatgactccttttcacaccaaggataaaaatacaaactcctaaactttgtgcccaagattcttcacaatcttttgcctatttacttcctttgccccatcttctgccatgaaccctgtgcttcaggcatactgagctttgaaccaatgccccaacatatcttttatgcttctgtgagtgtgttctacctgttaagtcttaatatcatttattcattctgggcctgatcaaattcttctcattcttcactttcatgtcactgcttttgggttgatttcctgaactcctctaggtaaggttagatggtaaatctatgtattcccatatcaatttgtacatcctttaaaatacttatcattttgttttaattacttgctatacgtctttcaggttccaaattcatattctttctggtgagaagggacattgaatggtgttgtccaggggtaagacacggaatatggtggagactgctcacctggaccatggataccttgtctagagggtactatggttattagcatgaacttattcttgatgtatgataatacaaacccagtgttgccaaactgcctaatttttcaagagaagctggaattcaggatttatacatgtaatttcctgatttttaagtgtacacacacacacacacacacacacacacacggtaaaggccaaacaaaatttctgtgggctgaatatatccctcgagctgaaagttttttgcctctgcactagaaaatggtttggagtaaaatttccattgttacaacaatgcaggcagatgatatttttggatcagatgcagtattttttgccaccaaatatgttaaatatccaacaagccatggctgagacattacaccaagtccatgctgataagaacttttcatttgtttgcttcatatgtgatctgtagattcatggcactaactactatttgtagatcacataactttggaatttgtaggggcctgagcagttattctcagagtctatgctggaactgccttttctctataacatcttggatagatcgcagtccatccgtaaatagtgcacacctaatatagcagaactcttaccttgtaaggtaatttagttaattatcaagcacttcacttatctaagaggttttcattatattaaacaaatccagtttccccgttaagtagtcttattgaccttttggaattctatagcaatatctaattcctcttctgttggatggtgctaattatctcaataaagctaccaaaaaaaaaaccaaaaaacttctgatcctaagtcttatgaactccctgtaaaacagcaatgattccttctcttattttcctttgtcatggtttccttcatctaccccaaactgattctggatgttagcaacagctcatgtgaaatgtgaatagaatgctctagggctttctggtcaacacaagatactcgtctcaaagacatagatggccacatagctgtagacgctgtaaatgcagcaaggttgaatttactgttcagcttcctcatcatgtggttgtcctacagtgagcttactatcaacttaggttcctcggctactttagtcatatttttctttagccatgttttcccatcctgaaacttcatagctggctttatggacttaggtgcagtaatgttcatttctatcatattattttattgtattagagatgatccattctccatttttagtgagttggaagaatagatcatctctactacaataaaattgagacgaatgattcatctcaattttaatttatttgttcattcattcattcattcattcattcaactatgtatcaagcacccatttatgtgccaagtactaaaagtacaatgatgaagatactcggagattaatgctaattattcaccttgtttactgctgcttcaaattttgtatcacctgtgaatgggatgagcacattaaggtgacaaaaatggccaactaagattatatgccagatatagaaagatgtttgagaatgtctcgatgtaatttactacattaacactttaaaaaggagaaaaaaattttataataaaaataaatgtagaaatggaatttgataaaatgattcatcttttctttgtgttaagataaaaaccctgtagattaatatggaaaataatttcttaacttgataaagaatatcttctgaaaagtgacagcaagcattataattaattgaatagacatagaagcattttttaaggttaagaataaggtatagatgcctatcattgtcacttttgtctaaaactatattggaagcttcaaccaacacaataacagtatgtaaagtaatcacaggtatgaggattgaaaagaaaaagacaaaaggtcattatttttaagcaatatgattgttcatatagaaagataatctacttataatcattacaactaataagagagattagtaatattgctgtatacaaaatcagagtattaaaaaagtttatatacatcatgaacaattagaaaatgtagtataaaaatacatattatctgtaatattagcaaaactatacatggcttaggaatacaatgtgcaatactttagggaaaaattataatgctttactaaaggtcatagaagaaaattcaagagagagacatgtgttcatggagagtaagatcaatagtgtaaagatgtcaattttaaagaacttgaaccctgtgggaaaagcactgcaggagaagtgtaagtattgggtgatggttgaggtcagccaagcacagcatcatggtatcaggaaatcagcaactgagacttcacatgctaagactgcatgacaaaatgagaagatagatggcccatgtttggtggtgaagggggtgaagttagtgtttataatacaattctatttccagtagaaaaattaaataactaaaaatagtctccgttatgtagactgtgtatatatgatgaaatgagaaaggctactactctgtggcccttctgtgtatagtccgtgtcctttttgaaatggatagaatactcagatgggggtagtaagggagagtttaaagaactatttataggactatcaacaggggtgggggatacctaaaatgatggtaaagcagctaggggctggcaataggtcggagtcactgtgatccctaggctgaagacgcacagggttaatggctgttaatggaaatcagagacatagttgtagctgtaggaggatcaagagatggcaattgttactttctgtagaggaacacagccactgctaaacaatggcccagcagagaggacttggtggaataaatatcacaacctcgctcctctcctaccctccatttatctgttggtgacctccattgaccaactcctactgaaagtcagagagaaaaaaaatcccattggtgtagtccataaaggtcgacatcccagagcacagagcagggcaaagaagagcaaataatggatttagaggggaaaagagagaatgttcagcgcacaagagtagctcttcaccaagcttatatgttacaagtctactcacactccattaactgatgagaatcaatgttgaggagtggatgatttttacactttccaatcaggactagaccagagcagagccttctaaagaagggtcttcagtgcctatttctaaactatgctggggaaagcaggatctgactggagaataagtcccttggtaaacaaatgtgagtatttgccttgttcagtccagcttatgctctgaacaactaaggatcttgtactatataccaatgtacccaggtaactccaattattaggagccagtgaattggatatatactttgtgctcattccattctccttcctactgctgagtcaatcaccggtgaaatggaactcactgcttggattgtcttcatttggatctcagttccgtcattaaacaaatatttattgagtgccttccatgtgcaagacactattcgggcacagtgggaatatcacaatgagtaagagagtccttgccctccagagcttccaggttggtaagaaaaagaaactaaattcatagaaacctacaatgaaaggctgaatttgttatcctactacccctgtttttttccccaaactgcttctctttatgggcagtgtggttgtcctccatcttgtttgtgttgatgtctcgattcttttttttttttttttttttttttttgagatggaatctcactctgtcacccaggctggagtggagtagtgagatcttggggcactgcaacctccacctcccaagtttaagcaattctcctgcctcagcctcctgagtagctgggattacagccacatgccaccatgcccggctactttttgtatttttagtagagacggggtttcaccatgttggccacaggctggtctcaaactcctgacctcaggtgatctgcccgccttggcctcccaaggtgctgggattacaggtgtgagccaccaccccaggccagatgtcttgattctttttgtcaaacctgtccttagaaatactatgattgtaggacttaggaggctgtaagcaaaatgtttaaataatagcatgttggtgtttactaggagacctcttccctaaacacatcatgcttttgctgggggtaggatgggactcagaatgtgggcttacttctttgtgtctctatattgagtagcttcatgccataagtgttattagcacaactagagaactatgcatatttataaagtgtgatcagtgttattctctacacattagcttgagggcacatggcatttaactcttgcaattccagactcatgcagtgacctgagtcagagtctgcaattttgtcttcagccctaccttgatagcaacagaatccacccaatcagaaaggaaatgaaaaggggaagagtgggtttttggtggggaggggtgcctttgcagtgagctctgctctgtctcaatctttcttacaggaggctaagcattagtagccccaagtcctatggatattgtgtgtagattctcttgtcttagaacccaatggctgcagcaaggtactcatagctacttctgttttccctagaattctctagccagttgtccaccaacccaaagactcaagtagaaaaagtcccaagtatttaagggctcatcccaacctaagaggtccacatgagcttcagaatatagcagattgggtctcacattcattgttttgttgttgtttttcggttttacataaacgtgagtgccagtatctttgggttgagactgggcctctaacaaggcccctgaattccagtctgctcttacatctgccctcttggtatagttcaagatccactcaaagtggtcctcagaacagccttcaacagattttggaagaaaataaaaggaggcccatggacagaaaacttagggagatggtgcataccctcttctcttctgaggaacaaaaatggtaatcatatattagaggctctgagaagtcttacaatcaccataaggaaagaaaaacccactttgattaaacccacattttacaaatgtatttgctcatacatttctcctctcctttagggaaaatcacaatatgttggattgtcaaactttcaataaatgtgagtggctgttggcaattggaggtctgcggagaactctaaagtttccaggaattggaactctaaaggctaccttccgggactctgccggctacagtcagtccccacatctttgagcttctgtggatacctgaccagcggtagcttcccagtgaatgccctttatgagccagcactgggcagggtattgcagtcagaaggcgtgagacaagcttgaggcagtgccttaaagggtggtttccatggatgccacccagacccagatcccagaggcacacacacaagcacttgcatctgttttttcactcggctggcttgcttcctcaggcccagagctagggtctggggattcccatctgggttctgccgttaatgggttgtgtgaccttggagcagttacttaacctcggggtcctgtttcctcagctgtaaaatgagggggttgcattgtgtggtcccaaagggaggcttccagttccgctactctgtgaattttgcaagcacaaaattgtgtgtcccctctccatgcctcaatgcttttgtcttgcaaacgaaatgagtgtgagcctcagaaaaagtggggtggcttatagaattgatgaatgcatggtggtttaagctggagttccagttcttgcctgcacttgcaccttgcatcctgaggctgacatctgcttattgtcaaacaactggaagacgcacacataagcaaaatcaaagatccaaaatgggaagctggccacagggaagctgggcccttaagcagtggttacaaaatgaagtatcaagaggtcgccaggaaaagtgaaagagaatggtctggtttgaatcctagcactagctgcttaacctcacttgatccgtttcttaatccttaactcctagctctctgggtcatcctaagggttcaatggggagcaaagctttggaatcagacaacttaggttgatggctttgctctgcaactcacttactgtgacctccagtgggggttgagtaactcttatctgaaatgcttgggaccagaagggtttcacatttcatatttttgtcaggttttagaatatctgcatgatattaatacttatgctccaatgagcatttcctttgagtatcatgttggagtttggagcattttggatttcagattattggatttgggatgctcaacttgtagtttgtttgctattgttggttgcagtcagttctcagtaaatattggctctctccatccatatttattatgttctgtccttttccagattcatatgatatgagacatcattgtccaatttcttccttacaacagtattattctttttttgctagatgcaaagggaagccttgacataaacaaacaaaacacaacctgattttttgagccatttgaaagtttcttttataaacaaactcatttcttgaatcatcttttgtcccatttaattagtatttatttgcctctgtgttttagtctcagtaggcaaaccaggaagtgggagctgaggtcaaggaactttcttcttgtggttctaagctcatggcacacagggctgagcctcctgggaagcagatggagaaactccagatcctggaaaggagagagggggatgcctgcatactcttctgccccagtgagcaggtgtgccccgcccctgtctctcagcaaagacctgccaagtaacaattgacacattgtgtggaaataaaagcagtgggcgagtagctgcagtttctaatggcagcgtgggtagtcgggggcgggccagccccagcagtgacagctgtggtacccaacattgtcagtgcagacgctgatggcctctgttccccatgcctgcccacatttgtgcaccctgtcactgcagggtgacaagcccaaacacagggagcctccctttcttatgctaatgctctgtaatgacagcttccccagcccaccaggtgtgacagccaccagaggcagcctccactcccactgctgagtttcccaccccgagtcctggacctgattcaggatggagcctggagaaggacagacaccctctgccagccatgaagatcccaggcccacaagttgctggccctctgtagcctagatcttgactctctcctgctcattagggcatcttgtcactgtccactgtcttcatcttcatccaccctactccttgctgtctaaccacaagcgtcttctttatgttcttacatgcactaaaaccttccttgttttctcttgctgttctttcttgcttggagacctttgacacttgctcttcccttccttgatttattcctgtccttcaggactctgctaatgctgccgcttctctggctttcttgttctatatcgatagccctgtgtttgttcttcaacatcactgtttatttcctagatactattgatattgatctcagtctttaatgttcttgtctgataatgtatttatttgcttatttgtctcttctactataatataaactcaataaaggcagggacctggtctgtcttgttcacagctccatccctagagtctattccccattgcctggaacatagtagctactcaatgaacacaagtggaatgaataaatgaataaaaatatgcatacaggaaaacgctcccataagtaactgtggctcatcaagcaatgatccccaaatggggagtcatgaccccaagggcacacactgtcttagaaaagctgcccagtgatcctagtgcttgctcttttgtaagagtaagtgaactctgctgcaaaggcctgttcctgtgcagccttctgcttcttttgctttcctaaattttatttgtctgatcctttagccatgttctatgccaactctggttacagctagttaaatgattaacatttgctctcccaagctagtccagcctgagggctatgggtaaaaatcatttaaaaatcttgttttctttctgaaaacttgtaaggatctctctttacctttgaagtttggaaatttcacaagatacctagggtgtatgtcttttttcattagttctgcctggggctcagtgaaccctttcaatctgaagaccaaaccagcctgtcctctaattcacagttttcttctattatttgattacttttctcccattcattttcctgtcttcttctgggtctcctagtaattacttaaatctcctgaattcatcctttaagtcccttattggctcacccttgaatctccttttaaaactttaattcttatgcatttatgcatttatgtttggactgatttgtaagatgtttcttctaattggtctttccatcactaactctcaggagtgactcttcactttttcaaattttctattaaatttttaaattttggaaacaattttcttccagaaagcctgtttcttgcctcagtcacatctctttgagagggaatgttacttttctatcaaagttgttttttgttgtttttgttttttgttttgttttttctgtttatcacaattttttggcctcaacaggagccatctgtccctatttgtcagcctggtcccctgtctcaagttactgagtctctttaaaatggatggaggtttctttgccttctcatgggtgtggatgcctccgcatccataaatgtggtaaggacactgaggctcttgttctggtgggtttgtgctctgtccttcttaaccccaattctggcctctctccctagtccactgtctcctccacagaatctcacatcctagatatgctcaggcttgtctctggatttcatactttggccagttcaattgttttgagtcacctaaataggaaatgtagaaagactgagcagccacctttccagaatgtccagtagcaatacaaaatgcagtgggtaggtggtttggttcttagcctaccccactgtgatcaccggggaccctcttccctatctatggcccctctgttttcctgaggatatggtggttacctcaggtgctccccttggtggtcaatgaatttctctagcttcagcttcattctcccatcctcatccctgcttcccctccccaaccccgcgtcgtcctgtcactgaagacactacctatgtctgctaatcagccatcatgcacatgttaaacctgccttgactgtcctggctcttcttgccacactgatgtatggattcctttgtatcctgcctcaaaacaaatcttcatttgttatgctctggcaatctggaacattgctcagagctggcagcctctgggtgctcgattcaaaagtagctcttcctgcaggcaatgaccagaggatccccagaactattttgatcaagttgatcaagttttatccttttctaggctgcttatttattctatcagttctcaaagtgtggtccagaccctttcaggagtctgtgcagtcaaaactaatttcttgaggagattagggtgttaattttcccgttctttctttcacaaacacgtagtggagtttccaaaagttatcccacatatcatgacatcattgttctggtggtgagtgggatgtgtaaatgaatattcttgggtttaaagcatttatcagttctaatttttaatatggtacatatcaatagctataattcacgtaaacgcaagctccttggagtattcaacactttttaaaagatgtttacatcttttaaacagtcctgaaactaaaaagctgaacaaatattgatgtattcatttactcaaaaaatattattgagtccctgctgtataccagacactatttttttgtggattatgaagaaacacaaagaatgagacagagcctttgcttttatggacattctagctggggaggtagacaactacaagttagtaattaaggatagtatctaatttcaggtggtgataagtaaatgaagaaaaaacaaagctgaggaaagagtgcaaatgccaagggttgcaattttagatgggggagtcagggaggcctctttgcagaaaccacactggatcagagacctgaatgatgcctaattctttgtatcatttctcccaggaggataagaggcccaaagtgcacatggactcatggttgcccattaggacatgaccgggctttctagtgggtgtgcaaaatttgtctctcatgaaagacattactactttaaatagatcaatccaaagttcagttcaaaatgtttatcacaatcatatgaatcatttatgaaatatttaatagctgatagttaccacgtgccagggattgtgaaaattatatcacatgcatttctcattgaatcctcataataacacactaagctaaggactattcatatctctactttgaagatggggaatcagaaggctaaagatgaagatgcaaaatccatcatcaaagcagttagcagcaaaaccaggtttcaaatccttgtttttctggttccaaaatttatgctcttgaccatgaggcaattgtgagaggcctgggaatctataaataaattcacattcctttctttgtagaagctcattgtattatggaaataataaatagacagtaaattattataccatgtggtaaattctgggatttagaaaggcatagactataacaagaaaccaaaagagggtcatttaacccaactggtgggaaagcacctatagaagcttctagaaagaggtgattcgaaatctgaatcctgagagttgtgaggacaatcaagggaaaaaagaagagaagtatgttcctggttaataaatgagcataaacaaagacactgatgtatgaatactatacagtatccagaaaactgggaagttcagtattgctggaacatgagaaatgggagaaccttcagcaagaggtcatggagttagaaggtttgtgattatagacagcattatgcaacatattaagaagcttggaatttgttttagaaaaaaataagaaatcattggaagtttttagacagtcaaatatcaaggtaaggattattttaagtaaaatgctctgataaccactctgaggatagatgtgaagaggaaagagcagtccagttaggagagaaatgtagtggtccagggatgagataatggtggtttcctctgaggtaaagaagatgaggatggaggagaggagggaggttgaggggtcatgtggaaaagtcagcagggtgaggtgactgattgaagttgagattcagtgaaagggaaaatgagggtgattcccagattttggctcaaatgactagattgactagataaatattggttccattggctgatttcaagaacaaaggaggagcagcatgagaggggaggttggcagaatgtgacatgatggtgcacgtgcagtgcatttgaggcaccagttgcttgttttaggaatctgcagctcaccacagagatctggagattgggatctggacattctcaggaactcagtgaatgttaaaatagtaggaatggatgagatcatccaggagcaggtggtagaacagtggtgaggaaacaaaacagaatagcaacagcataatctttaagaatatttaggctctgtaaccaaagttttaccaaaccagttacagaaactctagctaacaaggtctttttatctggtggggctaggaagaaaatggtgtaggaaagattgctatgaatgaaagaaaggaagcaagtgggcaaatactacagtgaaagcccatggaagagggagaagagccataggccagggaagatctatggagaagagacgaccaggaagtggataggtcagggaggggttaggttgttggtccttccaaaatttatgctctttatatgtttaacacagactaccttctccattcaaatcatgtcagaccaagtatccaataaagacaagattgaggtccatactacactgggcttccctcttgctcttatctgaaggtcaatcttaccaatccctctgtgccataatccagtaacctaggccatcaggttatagatctcctggaaaatctaaatcaaatgacaaggagaaaagttagctttccaactcacatggtcctgttgctttctggttccctgggaagctacatggacaaagatgtctgtagggctgaatttagttgtcttttcttcttacattgaaaatttcatttaggcttctgaaagctgtggaattcatagtcttctatggagacggcctcttttttggtggtgtaattggagtcaagtacttatttgttgcttgcaaacttttagtagcgaaaataacattaatatgacgggtaagacaggagttttactgagagatcaatgacaagaactggctccagaaagacaaataatcttcatttcacatggcaacctaatgataggtgaggacagatggtgacaaccctcaacctggaattcttcttgaatcaatcaatcaatcaatcaatcaatcagcaactatttattgatctgctgttttggctaaaaacacagaccttggaagcagaagcctgaattcaaaacccaagttttccatgtacccgtggcttatttttgggagagctcccgaacccgtctgagcctcaatttctttctctgaatagtaaggaaaataattgtagttaacccaatgggttcttgtggggaccagttgaaatgtaaggacccagtaactgtcagctgctattattgttgtttttgatattattgttgtggtagttgttgccgtgattgttacaacttctgagtgctctgggctactgtataggctttcttttttccaggcggattttatgatgttccctggaaatgtgccatgggggcttcaaagaaatttccaaggtggccctgggcttcctggatacttagcgtttatagttttccgaccactcagagaaacacatgggtctcagcccgtgaggatcccatggggagaaaagggaaggaaaggaccatgggggtaagagggaggtgaagagaggacacaggccgtcaggagagagagagaaagagatggggcatggggagggaaaaactttgtggtgataaaagaagaaacccccacgcttgtaatcccagcactttgggaggctgagggggcggatcacgaggtcaggagttcaagaccatcctggctaacacggtgaaaacccatctctgcaaaaaattagctgggcgtggtggcacacacctgtagttccacctactcaggaggctgaggcaggagaataccttgaatctgggaggtggaagttgcggtgagccaagatcacaccactgcactccagcctgggtgacagagcaagtctccgtctcaaaaaaaaaaaaagaaaccacaagtttttgccatcattccttcaataaattaatatctctagagtgcctattctgttccagatactcttctaggtgctgaggataccacagtgagtaagagatatgaagtccatatcttcacgaatattacattctgtgtgggatggaagggagcagacattaatacatcaaataatttcagataacaggaaatactttaaagaagattaaactgcgtgagttgctagagattagcttagggaggatgagaggacctacttcaagtcatgtgttcaggaaggacctttttaattactaaagagagattcgccttgtttgggggcaccaggttttacccagtactgaagtctcattccatgtggtggatctaactggcctgttctcttccctttcactaccttttcacaagctcctctcctcctcatgggcgacagacagcctttcttattaatgaatttgggaacaggacctaggtattcatagctcagcctatttcctctcctttttagggcagagtgaagtgtttgcaaataacatgtagtcttctatgcttcttcatgctttaggtttaccagggcagaactgcttgttgggggcagctgcagtggtttggcacattcttttctggggttcaggattatataccagcctttatgatctaaggcagtggttcttaaaatgtggtccatgaatcagcagcatcaacatcatctgggcacccattagaaatacaaatatcaggccccatcccagactttctgaatcaggtgttctgggggtggggtccagcaattcttgttttaaccattgcttcagttggttcttacgtgcactcaagtttgaaaccactgcttaagtgcagttttactttctctaaaatgcggtgttccaggtgttgaaaagctttgccattccaatctgcttgaagtcagtggcaaagagcctaaaacttgaatgtcaaaagcttttgcagttcttttgtgtatctcagggtacctcgtcagcctcagcactaatgacatttggggttggttaattcttgttttagggggccgcgggggtgttgatcttggacgttgtagggtgtttagcagcatccctggcctttactcattagatgctagtaacgttccttcctaactccagctgtgacaatcaaaatgtctccatgcattactaaatattcccttgaacacaagatcatccctggttgaggaccattgatctatctgcattagttgagagtatagcttgtggtttgttctccaaaaccactaagtcaaatgtcctgcttaaagaaataataatacccacatcatagattgttgagatgattaaatgtaaacatctaaaaaactgttagaacagtatgtgtcttataaaaatggtcacataaattaggtattagtaattcttattgtaattaaataatatatagactatcaaagatctatttaagattagttgttagtatcattattacttgaattattattatttctccttatctcctgaaatgcctatgcagaagttaattgttgttgttaattttacttctttatctcatgaaagacctgaaattgcctttattttgaatatggcacttctagatcttttatctattaagagaaaggatcacaaagacctttgttcttattggttttgccttttacccacttatgcctttcagttagaaaaatgtagcaaacatgtgactaaaccactcatctgtttcccccactctccttgaggaatgctcaaacacatttggatagtctgttttctcagccctcggagtcttgtcacttactccgcccacttttaaaaagaaaagcaggttcattccttacccccacccctatcccatgaacactgtgatcctcatatgtatgtagagactcttttaaaataaatttttcatagtgtgccaggattgacagctgctgcccacgtccttaatgctgtaacagcaaacatctgaacaaagaggggaaaagtcagtaaaccatctggatgtttcgttgatgttttgccatgcaatagaagttatgcaacatctggatgacaacctagtactttgcctttctattgggctgcttgggtattgagtagacacagattttattgtaacatggtcataatgtacaagttcagaatttcaaattcaacccaaatcttttggagcctgaattcattcacccttggcaaaacgtgagtatgtatttttaaagcaataagacttggaaagtttattaaaatgtctcaaaaggcatttggacgtcaaataactctcaaacccaatgtttttgcgattcaaatgaatcagaaacatatggattaaatttcctttaaattgctctcaagattaaaaatcaagggaaaaagtgcccagggccaaatatgttttgggttttgcaggacaaagtatggttgaaactgagctgaagatatgaatagcacccatactgtctttttgaaggaccagagttttattcacagagcatttattctcactctgccgagcaaccacacagaccaccaaacacaaccataataacaaacatcaacagttaaaatgtctgctaatttgcagttagccaaaaacaaaaaacatacttcaaagtcaaactaaagacgtctctttctaaagttcccctgcaggatctgaaaatgattaaaaaagaaattatgtctgaaaaaggagctgtttcaagcattatttaaaagtgggcagagatgggccttctaacagccaagacacctcaagcagcaaccagctctggactagtcattcttggactcagataccaatttaaattcagcgccaaggggtctaaactaagccagaggaaaccaatctggaagacatgatatggatgagcatggaagcttagttctccataggagggttctttatttgatttctgctattcctactattctctactcttgccaatgaaagaacagaatcagaccttattggtgaccaaaatacgtcttaaaacataaaacacatgttttaatctgattgtctcatatcaacttttttggtcaaattatttgaccttccgtttctgcttcttcagattaaaataatagatctcttttcctaagtttaccattcttgactttgaccagcccctgaaggcaaagaaatatttggaagaaagagtaagagcacagtctgaccttgcttgctttatctagttggctctcctgcagaaattttccacaccacctcccctgtacctcctgttccccccttcccggtattaatttcatggcttacatttaggaattttattatagttaggggttgtatttattatccccttttatcaagtttcacatcagatctctgaaactgttatacatttcagaaagccatttatttgttcaacaaatatttattaagctcatactatgtgccaggtacatatttactgaagatatatctgtaaacaggataattcagagtagatgagtacataaatggataaataagataattggagatagtgaaaagggttatggagaatataaagcatgttgatgtgatgagaatatcagtgagtgcctgcatatcaggagggagggagagagaaagagagagagagaaagagaaagagagaatagatataccagggagactgggagggaacttaatggcatgatcagaagaggctctctgagtaggtaatatttgatttaagccctgtatggggagaagcagctttgtgaaaagctgggaaagaatgctcctggtggaggggacagcaagagcaaagaccttgaggcaggaactcacttggcccattgaagcagaatgaggactgtgtgcctggagtttctggtatgagtgagagatattatcatgtgaaattagaaaggtaagcagattacatagctgcctgtaagccacaggagggttgtgcattttattgtgagacggggaagttttcagcctaggccagcatgatctcttggactcatatttttaaaatatcattttgactcctatttgttgactggactgtagggagcaagagtttataacaaagaagactggctgatcaatgtatgccccatcctcagtctctacttttgctgagacattttgaacaccagtgattcccttttttcccctctacccacaggtgagaaattgagttctgttgcccagcatctgaaggggtgtaagctcattccctacccttcctcagatactgggcattgggataatggtattttaatgactttttcatgattgttaagacttggtgttatatagacaagcctcaaaacacactactagttgaactcatggtatgctccaaacacaataaaacaatccaaaaatcttgtcagagttgaattttagtctgctgaggtacttctcaatctttgaaatggatataacaattgaatttataagattattgtaagcattgaagtcaacgcagagtggcaagcacttaacacagtgcttgaaacataataaaagacttcttgatatgtattggctactattgttacctccaagatattaaaataatctttgaaataacctagccatgacaaaggtatcacaaatagagactgtagtgtgtgggccaatatcatttgtgactattgctacaactatctttaatatgactcaatagaattgtgtattaaaagtgtaatattccattaccaaatatggtttgtttggaaggcaagggcaacattaatattagaaatgctataaatacagcacattacagctcccagattctttttctaacaatgccaatcttgggttacctgtaaacatctcaccatctcacccctagagtatgtatgggaggcattacaattattcccctaaaggattaataactacttcagattagagttcacagcttttaataacattaagaggataaaaatactcctatatacccctaaaaataagaagaacatttaacacgatttttagggttaacagttgttctttcttggtggtaggatcacgtggtatacctcaaatcaattgcagtgtacatctattacttctgtaatcagaaaaatgttgcaattgtaatctcaatattagattcccagctgctgtaacaaattgccacaatcttggcagtataaaacaacagacatttctcctctcacagttctggaggctagaagcctgaagccaaggttttagcaggtccgtgcttcctctggaggcttggggaaataatccatccttgcctcttctagcttgctgtggctgtcggctttctttggcttgcggctgcatcacttcaatccctgcctctgtcgtcttatcactgtctcctccttatctgtctaatctccctgtgcctgtctcttataaagatacttgtgatggcagttggcacccaccaagataatccaggataatcctcttatctcaaaagccttgatttaatcacacctgcaaaaactttagcataaaggataacatataggttccaaggattaggatatggacatatttctggcaaccattatcagcctgccatagtcttgtaacaaaacataaaacacacacacatatatatatatctatatatatgtgaatattatttaaatataattttttaaaaattgctgagccaaagccaatggaatgtttaatagtgacattcctatttacttggggcaataatacaaaaatgaggttcaaagtatttattttatttgacatattctggacaaggagatgagataggaaatagactattgaattaaaggaagtaaatgatggtggtttttggaaaacactattttctataaaaaaaaaactgaaaaagtattagtatttaatgtaaaaatgaccagataaaacattagtttaagaaagccaatgactgtcgtatatgtcttgaaaaactagctattatttaatataacaataaaagacattctaataataagagcagcatcaacatccacaaacaatacccgtcaaaatatgttaatttggcactttagcgatattctctttttatcacagtaatagcatgcccatagtcattgggagaaactagaataaacttgtaggaagacagagtcaccagactggtcacccgtatttacctgtccctctgtggtagttttttttagaggaagggtctgcattaaggactaagtggaaagtcagtccttattttagttagacttgtgagtgagctgaatgagactgattcaaggcagctgataaaagttaattgattgattgacgtattttcctttaaggtgtgaatggctaatagaacaggcaaatagcttaagtgtccttctcctcttccaaccctaagaattatatattttcctcaaacaaaccctcaactggtaatatttaaccagcatgggtaacttttagggggtggaggaggctttttgttaagaaaacatcaacatcattgcttgttatcttgtgttcttcaatgagcagagctgacccagcctcctcttcctcctctcatataagaaagtaactctattctatcttagcctccagctttttggaggttcttccttaagagcctttttagcaaatcttctcagggtctgcctccatttcgtttatttccagacttgctcatatttttcttttagtgattcagcagggaatggcatcaagaaggagcctgttctcaatttgtttcttttccttatgacctaggattgactgtcacatgtaaattaccaggcctgtgaaagccattcaaggtgacatgcagtgatcttggaccacagggcatcatcagccctcagtatttaacagaaaaaaaactgatgagcagccagtgaaggtcactgggcttgaggagcacataaccctcaccatattctttacttttaatttttcttttatttgatttactaatataacatttatatacagtgaaatatatagattttaagtgtacaattcgctaagtatcaatgaatatatgatatacatatgtatttatgtatacacccatgtgactaccactctgatcaaaataaagaacatttccatcaccccaaaagttctgtcagcccctttcagtcagtttctaccttcactccacccaataggctatcactgttcgattgctatcattatagatcaattggcctgttcttgaccttcatgaaaatggagttatatggtaggtaatttttatatccgcctcctttattaaaaggaatgtttttgagagtcatccattctctctaaattttgtgtttgttcaacatttaacaacatggcaaggaggaatatgaaaggtaaatgaagaacaaaatcctaagctctttggaaagacaagccatcgtaaacaaatttggtaaacatccatatgaagatttagaaacacttggttacacttggttaatggtgtggaggattttcattgtcatctccatgaatcagaacttgtggaggtagtggtaacatcagtctgccatcacatgacctgtaatgctgtggccatgggcatattttaaaagctccacttctaagtaacatagttcagttgagaaccactgccctgtaatgaatgtgagatgggcaatatgaatttattgttcttttagcaggttgcaattcctgcctgcttcttttactatgagaatcttgctgtgattttagtatttataaatcatatattcatgcaccatacttttaaaatgcaagttgacaattccatttatttcctttatgaagaaacagtgatctgttttcagtgctggaggaaaaatgggctgtgctggtcactccactgaggaaaattcctgaaggcatgctaaaggtaattttatctttatatgattttcactactttagacagaataggagaaactatgctgtcataacaaattaattttaaaattaataaagatgcattttttgtttaggttacatgtccaatatagattcacaaagcactcagattcccagtctgttcgtttgcagtatgtggattgactggactctaatgtcaccacagaaaggcacagaaggcagaatattttcaagggccaggcccaggaatggtttacatcagctctcaagctctgctgtaccttagaatcatcaggggagcttttaacaatgttagtgccctggctgtactccataccaattaaatgagagtttctggggctgagacgatacatcactgtgttttaaactctcctaggtgattcctatgtgtagctagcttgaagaaccattggcttgtatcacctctgtccttgcttctttggctggactgagtcacatgaccctgacctacactaagggagcctgggaaatgtagtcttcatgggtgcccaggaagaggccattgaaagagaagttggcaaacctatgtctttgtgtctcacacactcattttttaatgttaacttcagaatgtacctccctcaaacatacgcatgtcctcccactctaacaatataagcctcactatggaatggggaggagatgtggattgtcttgacatctcagagatacttgctgttcactctggtcccactcacatttgaagcagggtcctcaataaaggattctaatctttattctaagaacattgggcaccttttaacaaagggaccagtgaaactagatttaattgtttgatcgatgatgtggggcaagtgtggatgggagcaggccagtaacgaggtctgtgaggtcatccaggataagacaatggtggcttgctttcaagtgacacaaatggagatgtatttgagactgaaaaaatgagattatagacctcactacaagaattgcattagttgagcaatgcaggtgagaggtatccatcaggacttatgtgtttccagcacaatcagccagatacagactggtggagtgatggggaagacacttaatccaagtgtaaacaaaagtaaagtgaagaaatggagacaatgcagatagatactgctttgaagaaacatgcctcagaatgatggggtagcgggagaactgagggaattgccttgtccagccatcagtatcatgatatttacttcccacttaactattgatctgcatatatagcttcttgggctaccactcagagagggaaggtggattttaatgttaggcaccaatgtctctccttatacttggcttatgcctcctggccgatccacccttctgtgtgcctgcctgcttggtttaaaatccatatcatatcaaacagccagttaaggaataaaaagtttagaatactcaatagaagagagattaggaaccacactgtactttttttcttttaagttcttttttttattattatactttaagttttagggtacatgtgcacaatgtgcaggttagttacatatgtatacatgtgccatgctggtgcgctgcacccactaactcgtcatctagcattaggtatatctcccagtgctatccctcccccctccccccaccccacaacagtccccagagtgtgatgttccccttcctgtgtccatgtgttctcattgttcagttcccacctatgagtgagaatatgcggtgtttggttttttgttcttgtgatagtttactgagaatgatgatttccaatttcatccatgtccctacaaaggatgtgaactcatcattttttatggctgcatagtattccatggtgtatatgtgccacattttcttaatccagtctatcattgttggacatttgggctggttggttccaagtctttgctattgtgaataatgccgcaataaacatacgtgtgcatgtgtctttatagcagcatgatttatagtcctttgggtatatacccagtaatgggatggctgggtcaaatggtatttctagttctagatccttaaggaattgccacaccgacttccacaatggttgaactagtttacagtcccaccaacagtgtaaaagtgttcctatttctccacatcctctccagcacctgttgtttcctgactttttaatgattgccattctaactggtgtgagatggtatctcattgtggttttgatttgcatttctctgatggccagtgatggtgagcattttttcatgtgttttttggctgcataaatgtcttcttttgagaagtgtctgttcatgtcctttgcccactttttgatggggttgtttgtttttttcttgtaaatttgtttgagttcattgtagattctggatattagccctttgtcagatgaataggttgcgaaaattttctcccattctgtaggttgcctgttcactctgatggtagtttcttttgctgtgcagaagctctttagtttaattagatcccatttgtcaattttgtcttttgttgccattgcttttggtgttttagacatgaagtcctttcccatgcctatgtcctgaatggtaatgcctaggttttcttctagggtttttatggttttaggtctaacatttaagtctttaatccatcttgaattgatttttgtataaggtgtaaggaagggatccagtttcagctttctacatatggctacatgatcgtatatctagaaaaccccattgtctcagcccaaaatctccttaagctgataagcaacttcagctaagtctcaggatacaaaatcaatgtacaaaaatcacaagcattcttatacaccaacaacagacaaacagagagccaaatcatgagtgaactcccattcacaattgcttcaaagagaataaaatacctaggaatccaacttacaagggatgtgaaggacctcttcaaggagaactacaaaccactgctcaaggaaataaaagaggatacaaacaaatggaagaacattccatgctcatgggtaggaagaatcaatatcgtgaaaatggccatactgcccaaggtaatttatagattcaatgccatccccatcaagctaccaatcactttcttcacagaattggaaaatagtactttaaagttcacatggaaccaaaaaagagcccgcatcgccaagtcaatcctaaaccaaaagaacaaagctggaggcatcacgctacctgacttcaaactatactacaaggctaccgtaaccaaaacagcatggtactggtaccaaaacagagatatagatcaatggaacagaacagagccctcagaaataatgccgcatatctacaactatctgatctttgacaaacctgacaaaaacaagcaatggggaaaggattccctatttaataaatggtgcttggaaaactggctagccatatgtagaaagctgaaactggatcccttccttacacactgtacttttgactgtgttggcttactcctggctaaagtgttgtggctcaggaaaattcccttgggaatccttgctttccattatggtttaagaaaatgttgtcatatttgagtcaaaatgttgaatagaaatttggaaatattgacccagggaatggcctacttgtttatttacgcttcccccacaacacatataccttaccccccgccaaccactagattaaaaaggcagcaagtctttcttctcaagtctttccagatagtctggtatacagttggttgttcaagggttatttttgatgaattaatgaatgctttgtggcctgaatcaaagaaactttgaacactctctccctgctatactttttgctcaggggctcttgaatggcctgtggataagtcgatgcagtggtgtcctcacagtggctctgtccatacccagtctcccaaaagacaatttttctctactctaacagttttttttaagagttgagatataattcacataccacaaaattcaaccttttaaagtacacaatctagtggttttagtatattcacaaggatgtgcaaccatctaattccactaatccccaaatattttcataaacctaagaagagctccaaattcattatcagtccctcctgattcccactaatctactttctgtgtctatcagtttgcctctcctgaaaacttaatgtaaatggaataataccatatgtggtcttttgtgtttggtttctttcacttagcataatgttttcaaggttcatccatagcatgtataatagtactttatttctttttatggctgaatataatatgttctgctgggcggctataccacatttttgtttattcattcatgagttgatggacctttgggttatttttacattttggttattatgaataattctgcactggctaataggtttagactagttagagtgaacaagtgatcctcagtttatcaaaggctcacaggacagctggggtcaccaatcagtggtgtcttatacccaccagtgagtcacctttccttttgatttattttataaacttacagatgtgctgcttctaggtagaaaggactatcagtgcaacaaaatctcacttaaaatacggtgaacttttatttttaatcaactcattgctaaaggaaaactagaacaaatccaatcagactgcatctcattttgtggacagctgcaataaaaatttctggatttccgggtttccctcagcagggacaggtgggtaggaatctgcccaactccagtgggaggatttgttctttttttagcaggatacaggaagagggaagagaaaaattgttgattgcacaaacgactaaaatggcacttcaattcccccattccatctagtttctggtttcaactgactccccaagtcatttcggtaatacaaaaagttctgcattctatgccgattcattttcagatggatctctcttgaacccaaattattaatgtttaggtcttcccaatgctggacacaccttcccctttgccagcccaagttagtacctcatctctttccttccctcctctgaaaaatatgaaaaggtttgtttcttcagcccgtgtggcattctatgaggcttgatctcaatcattccatcttttctcttcttgaggctgctgcctctgcacagacccagaaggcaggccctattagccatgcacagagactggtgggtgggtatcagtttggagccaagttcctgggcatgcatcacttttgcacattccttgtctgagggtgcaaaattgcacaagcaaactgagctgcccacaactggctaattgcagaggcaatcatcgccccggctccttccaaatgagcagggagcagctaattgtgctcacaattggctgattgagctcacagtcagtaaattgctgctgcaactgtttgtgcatacaattttgcacctgggagtaatcgtgggcgatagggtctaacacactttgaaagaacattaaacagtacaacatctgagaaatctaacactgtccagcctgcttggggaatttgagctgggtaggggaggcatacttcttaaattggagttggggtatctcagaccctgaagtaatgccccagggtgcatgttataactcatagcgctagtcataccacatcatatatctcttacctcacacatgaagctcaccggtcaacctgcaaaacatctcagccacaggagaggtggtagagtatttaccacatgagctctgaactcaggctaccttggttcagatttgagttcttctgtttccttgctgggtaacctttgcaagccttgattttttctcatatgtaagatgatgatgatgaaaaaatgtacctgagtcacagcgttgctgtgtagaaatgagataatgcttgtaaagaatgagcacatagtatttactcaatgaatgtttctaatttttaaaaaaactcttaggtcaaaatttgatcatgactttgacatccaatggagtacctcacactctaattttaggattattgttaatacgctggtgttagcatcaaagaaatttttgttttctctgtaccagctatgtgactgtggccaatttgctttaacttgtctaaatcacagtttagcaatctgtaaaatgggggtagaaatgttatctacccctctagggctgttatgtagattaaataagacaacgtatgtgaaggagttagcacttaataagcactctgtaaatgctagctcttgctgttgtcactactactattattgttataaaggctcctgtgagtggggtgggaccgggcctggagtactggggactttggagccagaatactattatgtaactcatgtccacagtgtgatttgctcctacccactgccctgatagaatggattcttttagatagaacagaggtgtgtgagctttatagcaaattgtcttgcttgggcccttcccaaatctacatgaggggagacattcagccctgtggccctgttccctgtgcttgccttgtcctggttcatttcttggtctctgatagagacaattttatagggttcttactctcagcaagaaaaaagagataaggacaagctttggcaggatccggaaattaatccaggggaggcagacattgtgtctctaaatgtaattgaatcttcctggagtctgatgggggtgggggatggagcatggaccttctgacttttaagtctgtgaggaggtgtggaggagggagggctgctctcccttcaagtccttctttcccatggtcccaacctccttcccttttccctttatgaccaccaccacgtgttctgtccctttgggtgtttctggctcttgcctcagcagcaatgcagggtgcacactccccattccttgctgtctaagaatccgagcatacaggactcttcacagtaaatgggctttactgcgatccggatgcagacagggacaaatggcaaagattttagaatcccagagttctcaccagcattagtctttgctcccaactctcatagcatggttagcttgggctgccataacaaaataccacatattgggtggcttaaacaacagaaatgtccttctcacagttctggagggtagaagcccaaggtcaagggattgtgaagtttggtttctcctgaggcctctctccctgtcttgcagatggccaccttttcactgagttctcacatggtcttttctccgtgtgcatgcatccttggtttctctctatccacttttcctcttcttataaggacaccagtcatgttggattagggcccaccctaaagtcctccttttaacttcatcatctctataaagaccttatcttggaatacagttaccttgtgagatactaggggttaggacttcaacgtatgactttttttgcagggggacacaattcagtgcataacacatgggattcttagaattttcaagaaatattttctctttaggaatgtaacttaatgaacccagaacccagctcaatcattaattagttgtgtgaccttaggcaagacaggcacatgtctcgatttgcctgggagtgtcccatttacctctgttgtcccagtgtagttacaagagcaccccctttcattcttaaatgtatcctcgtttaaataatgaatcgtgtggtcactattcattaactttagctgtcaaaatgaagtgaatgacacctaattcacaaaggtgctcagggtttgcaggggatgatggagaagtacctatcacactacccaatgcttggtaagtatgaatgtctttatactactttcttttttttcataaataatatatttgcagcatttatgattcacaacccttctgacaccagacctgtatgtgttttctacatcaataactagttcttcaactttctggacaccaactgagtgccctacaattcaattcagatctgacactaactacttggagttgcccagatcccacagggtaaaggctcagtcccacaagactgacccccacttcagctgccagtcctgcaacacagtcctacctcccacctgtacttcttaccaactggtataaattatgagttctcatgacccccttcctcagttttaataatttgctagaatggtatcttctaagaataactaattcttcaagaccttatagaattgttgtccaaaaggaagctcaccatttctattagttatctggcgatgggctcatgagtctgaaatttaaggaaaacagtttacttactgaaatttcaggaaaataatttatttgctaatgctggtattagtaagtattagcccaggaacagtcaaatggaagggatgcacaggaaaagctatgaaggtggagcttggagcttccatgtcccctccaggtgcaccatcctcccaacatctcaatgtgttcaccagcttggaagcttagtcatttaaggttttttatggaggcttcatacataggaatgtttaagtcattggccattgatgcttaactcagtctccagcttctctcccctccgcagaagactagggtaaggctgaaagttccaaccatctaattacatggttggtccttccagcaaccaactcccatcctaaagctatgtagaggcccactgagactcaccttattagcagaaagtcaggcacgattgaaagaggcttgtttcaaatagcaaaggacagtcctgttacggctgtcactcaggaagttccaaggttttgtttttgttttgagaagctctgcatcagggacctgggacaaataccaaatacatatttcttattataatctctcccttgtacttacacctttctattcctcaatcccaattcccttggtcaggcaggttcatttttcatgaggaaccgtctgttgagacacggcctagagatgatgacagtgtagactggttagcctggatcagtggtcatacaggctcacctgtgccacagtaaactggcattttaagggcctccagattcagtgagagcccaggtaatggccctcttccatcctagaaaattgttcgtgtccaccatcaatagctggtggtgcacttggatgaattagggctccttggctgcaagtaacagaaataagcctctggattaagtgaaatgaaacagggaaagaccctaattataaaggtagtttatggacttaaaggaaaaatgaagtcaccaagcctcaaaaaggaaagggactagaatgcttcctgtgatctttggttcagggatatatgtaagctcttacttttttaaggggagaaatcaaaaaacaatatacaaagagaaataataaactaaacatcaattttccctccatccagaatcaatagcagttatcattcattttgatgtgtttgtttctggaggagtttgttttttgatcttgttttgctgaatgaatgaaatgaaaccaacttaacttctcagtctccagtcccacttgcctcccctcagtctggagatgaatgttactgtgagtttgtgcaccctttcaggttcagaatcaagagattctgaactttgcttgttcaggctcttgtcccatactctagggacagtttttagaataatttcaggtacctcctaagaataactaattatttaagacctcatagaactgtttctaaaaaataaactcaccatctctattagagttattgggaggtgagcacaggaatatgaaatttaattagttcactgggtcattattcaacacactcaagtttgaaaaccaatgctttagagtggtttctaatttacgtgcatctctgtaaccaatatggtggggcattctctgtcttaggccttctgttagcatggctcatccccaaccagtcccatatctgggggagtgtctgatgtacatgggttgtgccacaggcctgctttcagggccccattatgattttaatggaccttggacaatttcgcctttgtaggcccctttttcccacaatagataaggaaaattatgttttatgattgggttggtataaagttgtatttaattcaggctggattatattcattttttccttctggttttcaaataaatcaaaacactcctgctgggccctaaaagtattgtgggcccaagccccaggcatggtgtgcttaatggagcacactcctgcagtcattcaaggaagaggcaaggcccatgattggcattctcagtcaaatcacacgaagggctgcttttctgatatagtaacacccaacagatgaaatcaggagatttcctcttcaagccctttacatttccattgtggccagagtctcagatctgggtgcagacacaaccctgctacactacaggcctgtcctttgaaattcctccacatccattcctcaagcagtctccagtctgggtcaagctcctggagaggctcatcttcccacctgaactctcaaacatccttggtcacataggattgattaagaattcattcctggagctcctgctgcagaatttcctcctccctgttcacctctgtgcatctctttacttccttgtttaagaaacaagggcaggccgggcatggtggctcatgcttgtaatcccagcacttcgggaggctgaggcaggtgtatcacctgaggtcaggagttcgagaccagcctggccaacatagtgaagccctgtctctactaaaagtacaaaaaattagctgggcgtggtggcacccgcctgtaatcccagctactcgggaggctgaggcgggagaatcgcttgaacctaggaagtggaggttgtagtgagccgagattgcaccattgcactcaagcttgggcaacaagagcaaaacaccataaaaaaaaaaaaaaaaaaaaaaaaaaaaaaagagaagaaacaagggaacaagggctgctgtgtgctgatttctaggcactctgttagttttcttagagctcagagatggatgaggtcatgcctataccctgaaagatatcatggtctcaagcagaaacaggtaatctgatgatgtacgtcatgcacccggcgaagtatgatgagtactggagatctgggagcagctgggggccatccttggttcttgtcacaaggaataagttctctacccttctgctcctctagctagtcctgcctcaactcatttgcaggaggccatttccctgggtctcagcctgtatcacttgacttcttgttcatcaagcaataaatcatatctcatcaattatatgatgcacatattttaaaagccatttaacatttctgtaaatgggttatgattgattgcctcttacaagcactgttggccaggtggcagttgtgacaaaggtgcattgcctgaacatgcatgagtttgatctgaaaagtattgatgcttctgataagatcaggaggatgtctgcaagtaacttgcagagtggggatcagcaacctggaaggacaccccagagactgcagctcgtaaccagtaatattgcatataattttttatgtatgccaaaagtgatagacataaatctaaaagagctttttaataattagaaaataaaatttccaaggcataaggaaatactgtgtcatgatttaatttgtagcatttttttccttaatagtgcttaaaataatgatgtctttaatcaatggtgacacagatttgagaaagtaggctgtatgtacaagtctcacggtggctccatggggacagagaccaccatattttcaacacatagcatagtgctggcatgaaatagatgcttaatatgtatgtgctgattgtctggcattcttagttaaaataacatgtacacagaataaggggaaaaataacaatatgccatgaatagacttagaacattttcctatttctcactgtgtgccttaagtgtacatatcatatgacataacattttctttatagctgggattggcaatattttttctgtaaagggccagatagtaaagattgtaggatctgtgggccatacagtctccgctgccactactcaactctgctgttttagcacaaaagcagccacagacacattatgctaactaatgggtgtggctttattttaataatactttatttacaaaaacaggcacatggcaggatttagtcaatgtgccatagcatgtcaactgctctgaagcatttgttttcaaatttgagtgtgtataataatgactcagtgaacttgttaaaattcagattcctgagcccatctccagataactttaatagatacagtgagcttctttctttttgagcaacacatctataaggtcttgaagaattagttattcttaaaaggtttctgcaattcttctagaaactttctctagagtatgaggcaagagcctggacaagcaaagtacggaattttttaatgtcttatcaagatatcaagattttttttccccttttatttgtatggtgatgtcatttccctttttctttgtatggtgtcaggaggcagccacatattattagggattaaataggagagctagagcatttttttttttaagaagacagatgtctcatcacccatccagggtaaaggacaagtgttcaaaaatgaaattataccccttcaattttatggtcaaaaggagattcctctctctaatggacaacagaagtcccagtagccatgactgagtgcaggctgggattgtgcccataggagaaaccactccagaccaagccttgtctaccaatacagaggctgatgtggttgccacatgtgcagagctgtgcagacccacctcaggtaaacattggattcaaagaaactataaggcatcgctgcaataagcctattagtatggctctctccatggggtgattttcttcttttttagagaatgaagtcctcttagatttgtttgtttgtttaagagacaagtaaatagttttgaaatctctgcgtgagattttaatctggttaattgtctttaaatacctcttgcctgggtatataaacctctttagtactgtatgtggtcaggatgatgcagagagtgagaaattatgtgataatatagtaatgataacatttatctggtgggcacggggctaagaccttgaatacattgactcattctgttctgacagcaactctcaaggtaggttctataattaccctcatttttgcagaggaggatgagaggctctgaatttaggtagctactcaatgtcactagctagtagacattagagccatgatttaagtccaggcattatgactctttatgttgaactctttacctttacttaatgagacatcttactgggatagcacagcaagggtgtccaagaggagaaaaacagaattctcaatattgtgttgactaaaattcgtgatccatgttggataaaacttccaccagcacctcacaccaaactgacatctactccgttggaagatcccaatgggagttgcacaagttatttttttggaaagtcggcagtatggactgaaggtggaaatagggttaggcaagactgatactagagatactagactccagttccagaaatgggacatagggtggtcttgtgagctgagactttgtaagggcagcccccatcctgaaaaagatctgcagtcaggatgggcactgtgtatagccctgggagtgcatcgtacttcacaggaatgtcctcttgcccacatgtacacttccattgctgctgtcttcctccatcatagttgcctggtaaaactccaaccctggttaaatctaatggtctactttctctgaaccagcacccaagcttgttgaaggaaaacacaaccatgttgacaggcgatgcactgtatgattccatttataggacagcctggtcaaggcaaagttaggggacaaaaacagattagtggtttccaggggcagggagtagggctgtctataaaaggcatgagggaatcttggtgggtaatggagctgttctgtgtcttcattatggcagtactggttacatgactgtctgtcaaattacatacattaaaaaaggtggatattactgtatttaagttatatcttactaaacttagctaaaatgaagtctcaagaagcagctgggatacaagatgaagaatcatatcctgagctataagaagaagatgttatcatctttaatattaaagaaaatataatttatattaaaaagaatcttatatggtaaattattgtcctaaagtaaattaactgattgtttaaagaaagggatgtttactacaagtcagaaagttgaggcatgtcaaagattgtctgtgaaagttgtgaaaaatgttataaaagggaacttaggcaagaaatattgtgtaatttaaaagtaattaggcctcctggatgctttataaaatgtcactataactcttagctgtacgacttgcctgccttgcagctaggaacaacctagtatacgtggagttaactgctggaacaagccagaccttatctgcacttctgtctaagtcctagactctacacctagcacataattaaaatcccaaacttaccaaggttttcaacaaaggtaaaggctgctaaaagttaacagaataacatgtatttaaaactattgaagagacagtttatgtgcaaggtgtgtaagaaaagtaaaatatacttttggtaaaaagattataaggaggcatgagaatgtggatttttacctagattaaaagcctaaagaattgttttgaaggtttaagcaagttttaaaaggttaattgtaaaggaaattctgtgcgtaaacatattggctaaagttgaaggagcatcatccagtttttctgcaaattgagcattcaaataaaagcacaatgtgttctcttaaagcactaacctgttctttaacaaaaattataaagggttaaaaagagtctataaaaatcttaccttatggtcaaacattaaaattgggtaaatatgtctaccagattttattaaaattgagtttaatagcacactaatataaaggtgaaatttggcttatctggtataaaatcatacaggaagcattgtcaaatatcaaatggtgtttggctttcttttgactatatttgtataaatatgttattggtatgtgttccaaaattatgggagactcctataattctgataaatcttattgtacattatcagtaatagttataattgttatgttaaaattattatgtgccacagaggtaacagatatccttgtcaattgtgtctttaactatggctaccctaaaactttttgttatccataaacaattgttgtcttgttttggtcctctttagaaggtgtttttttttaaattttcttattattatactttaagttttagggtacatgtgcacaacgtgcaggtttgttacatatgtatacatgtgccatgttggtgtgctgcacccattaacctgtcatttagcattaggtatatctcctaatgctatccctcccccctcccctcaccccacaacaggccccagtgtgtgatgttccccttcctgtgtccatgtgttctcattgttcagttcccacctatgagtgagaacatgcggtgtttggttttttgtcattgcgatagtttgctgagaatgatggtttccaatttcatccatgtccctacaaaggacatgaactcatcattttttatggctgcatagtattccatggtgtatatgtgccacattttcttaatccagtctatcgttgttggacatttgggttggttccgagtctttgctattctgaataatgccgcagtaaacatatgtgtgcatgtgtctttatagcagcatgatttatagtcctttgggtatatacccagtaatgggatggctgggtcaaatggtatttctagttctacatccctgaggaatcgccacactgacttccacaatggttgaactagtttacagtcccaccaacagtgtaaaagtgttcctatttctccacatcctctccagcacctgttgtttcctgactttttaatgatcgccattctaactggtgtgagatgatatctcattgtggttttgatttgcatttctctgatggccagtgatgatgagcattttttcatgtgttttttggctgcataaatgtcttcttttgagaagtgtcggttcatatcctttacccactttttgatggggttgttttttttcttgtaaatttgtttgagttcattgtagattctggatattagccctttgtcagatgagtagattgcaaaaattttctcccattctgtaggttgcctgttcactctgatgttagtttcttttgctgtgcagaagctctttagtttaattagatcccatttgtcaattttggcttttgttgccattgcttttggtgttttagacatgaagtcctttcccatgcctatgtcctgaatggtattgcctaggttttcttctagggtttttatggttttaggtctaacgtttaagtctttaatccatcttgaattaatttttgtataaagtgtaaggaagggttccagtttcagctttctatatatggctagcctgttttcccagcaccatttattaaatagggaatcctttccccatttcttgtttttgtcaggtttgtcaaagatcagatagttgtagatatgtggcattatttctgaggactctgttctgttccattggtctatatctctgttttggtaccagtaccatgctgttttggttacggtagccttgtagtatagtttgaagtcaggtagcgtgatgcctccagctttgttcttttggcttaggatggacttggtgatgtgggctcttttttggttccatatgaactttaaagtagttttttccaattctgtgaagaaagtcattcgtagcttgatggggatggcattgaatctataaattaccttgggcagtatgggcattttcatgatattgattcttcctacccatgagcatggaatgttcttccatttgtttgtatcctcttttatttccttgagcagtggtttgtagttctccttgaagaggtccttcacatcccttgtaagttggattcctaggtattttattctctttgaagcaattgtgaatgggagttcactcatgatttagctctctgtttgtctgttattggtgtataagaatgcttgtgatttttgtacattgattttgcatcctgagactttgctgaagttgcttatcagcttgaggagattttgggctgagatgatggggttttgtagatatacaatcatgtcatctgcaaacagggacaatttgacttcctcttttcctaattgaataccctttatttccttctcctgcctgattgccctggccagaacttccaacactatgttgaataggagtggtgagagagggcatccctgtcttgtgccagttttcaaagggaatgcttccagtttttgcccattcagtatgatattggctgtgggtttgtcatagatagctcttattattttgagatacgtcccatcaacacctaatttattgagagtttttagcatgaagggttgttgaattttgtcaaaggccttttctgcatctattgagataatcatgaggtttttgtctttggttctgtttatatgctggattacatttattgatttgcgtatgttgaaccagccttgcatcccagggatgaaacccacttgatcatggtggataagctttttgatgtgctgctggattcggtttgccaggattttattgaggatttttccatcgatgtttatcaaggatattggtttaaaattctctttttttggttgtgtctctgccaggctttggtatcaggatgatgctggcctcataaaatgagttagggaggattccctctttgtctattgattagaatagtttcagaaggaatggtaccagctcctctttgtacctctggtagaattcggctgtgaatccatctggtcctggactttttttggttggtaagctattgattattgccacaatttcagatcctgttattggtctgttcagagattcaacttattcccatgtaaaagaacagaaattataacaaactgcctctcagaccacagtgcaatcaaactagaactcaggattaagaaactcactcaaaacccctcaactacatggaaactgaacaacctgctcttgaaagactactgggtaaataatgaaatgcaggcagaaataaagatgttctttgaaaccaatgagaacaaagacacaacataccagaatctctgggatacattcaaagcaatgtgtagagggaaatttatagcactaaatgcccacaagaaaaagcaggaaagatctaaaattgacaccctaacatcacaattaactagaaaacaagagggtggttttataatcagctataaagctctaacaggtgctcttgaatgaaggtttctgttaactggagattgtaacatcaaaatagaggaaaaacattcaggacctttgaagagctaaaatgttcattaatgtcaagcagtacagaaattaactgcataaaatgaactaataggagactggagtaatctttttagtgttttgcttaaaacattgctaatcctttgttttgcttttcaaagtcaagtaaacttttcttttgagctattaacagcttttaacaatttagtatgctcccataaacaaaatttggagcatacttgtctctctcttcctgattttctccagaatttggaaactatctgaatattcttaagttgtcttgggacctcaagaggagagagattcatcaactcataggtatttgatggtaaaaatccatggctgggcttggctttaaaaaggtcttatctcagattccttctacggaacaaaattccatcaaagctaatttaaaaggcctatgtaacaaataattattcttgctgcactgtatgcaaataatttagccaagtataacaaagcaaacctgtcctaccatgatttgtcttttaataaaaatgggaaactagagagagaaaattatgtttcaaaaactatggcactcctgttgttagattctagtgtttttcaatttttattattttgtactgcttaaattaaattctaatttttctggctacaagtttccaaaataagctgtgctttcttaaagccctatgaacggaaaactaggtgtttcagggggtgctgcctctaagtgcccccgatcatcacaggaggaaatgtcttcactgttggtgctgacaactaataactgaaggttcccagaatccttcgtccccatgtctagcgagtccacggaacccagggtaattaaaatggcatctgttacaggaatcaactcctaaatatattgcacgcaagtcaaagcctggaaagctaaggaagcaacccctgacagcccccaaaaacgtcctaaatatcaatgtaaagaaataggaaatcttaagctgaaaatcataaaaaaataagtaactgagtgagaactactcatcttactcagtctcacccctacctctccttttaagccaaatattaaaactttttaatggcaattatttattatgccacccttgtgggaattgccttactcattctactatttgcagtaggcctatatactgtagcaccctcagggtgaaatatcagacaaaaaacgtcaattactctagtattttgcttaattattatcctcatagcaggaataacggttactaacagaaaataacatgtgttattgggcctttcctagcagcacctctgcctgtcattatgtaaaaaatgttgtttctacctctaccaattgggcctagtaagaaacactgctgaaaaagttaaagaaagggctaaaaagctaaggaaatatcaaaacaaccaaataaattcttggtttgaaaacaaaatcatagcatgggtcatcccattcctgggccctctcctaataatatgcctggaactaatgttcttttcctgcctaattaacctttttcaagatttttaactgacagaatcatggccatttcatagacaactaccccaaaacatctacaaacggcatttcccctacagtcaaccggagaccagaaaactctctgtcccctcgtcagcaggaagtagcctaaaagaacacgctgtccctcctcctttttatagctatagagtctggattgacagagcaggagcattgccatcttggacaaacccctcattctaagtttcaccttaataaaaaactgcctaaatccaccagcctaatggctaaagtcagcatgaccataaaccacaaataacatctccaaccagaaacattccaaactcctcccccaccagagacatcctagcccctagataagtcccctccagccgggaagatgctagccccgagataaccccgctctgggccggaaagatgtctgccccaagataacctcccctcgtcccagagagattccaatcccaccataaacttctccacacacataatcattccaagcttgtgataagccccctcaccctaaacccaatatatactcttagtctgtaagagtaagtgctcctgactgaaattggctaggaacacctctcaggttttgtccaaagtaaacctgtctttaactgccagctgtatttcgtgtttctttcctctttctttaactcttacagaagagctttagccatgaaggacattgatgtatttgggagggcaaacatgaacatggtgatgtgaagtgggtctgaggtacacttgccaatcatacctcatccctttgtcatggagtcttgagcctatgggagcaagttgaagtctgtacctcatgtatggttggttgaggtgtagtcagtgctgatttaggaattgtaaaaggctgagttcacagatggacaatgcaaaacagtccagctgaagcagtttgggagaagacagaacctgactgaagattccaagcaagggcttatatgacccagcctccccgtatgagacccagacaattgtcatcagataaggaacaaagactgcgtcagtgattcatgtaaaggagtaatttaagcaagagctctcactgttggagcaatatttctacaggtcaaccaagcgtgaccatttctaactaggaaaatgcctttggataataaactgtctcctatacgcaccatgcagcgaacttgcttcatcttcatcaattaaacactcccaattttctcttccctggtatctgacaagaatctattttctcttttttccatgtaaagagagggtttttggaggctgagagtggtattagtgggatttgatgttggcatccccataattcaagttctcaattgctgttcccactactgcagggcctcaggcaaaacctctaaccttggtttcccccaaatgcataataaagagaagagtctttacttatttatgatgggctctgttacttgtatgagagatgttccaatgtaagtattattacaaggtccaatttactgtccagaaagaagcaatcctgatagaaatctttcatttaattaaaattgattttaaaattgcctgatcaataatgagttaaaaattcatcctggctcagtgggaggagagaggcctccaagcaatcctcactggagtgggttttggctcaagagtgaggtgggccttgccggccctgcttgactggccaaagtctgatgatttttcttgtggtccagacagccaagccctccttgagagcaggaggacatgcaaaagaatctactcttatttcttgcattttgagcagaaaagtttaaaaaaggcaactgaccttgctagttaagcttgaaccatttaacttactggaaaccaataaaaacatttacttattcattttgggggaatggatggtgcatttgcttgaaagctccctcccccagctacagaggcccttttccacatgtgcggtcactccagctggaaaaattgaagctgtcttcccaccctcccatagcctacactcccacatgcaatcatttgctaaattctaccagttcaacctctgcatctctggctcttttccatccccattgctcctgccctgggtcatactgtcttcacctcttacctggaatatttaatagctgtctcactggtttccttggcccacttgtccacctgtctaattcattttccatgctcttacctgagaaatctccttaaaaggtaggtcatcttgggttactgctgctcaaaaatctttggtgatccacattttaataaggaattaagtccaagtgccttggtgggcattccaagacaccataaatcagacctcttgccagcaagtaacatccactgtgtgtctcccaacaggctgccaactctcttctttcctcccatactgtgctactcagcactctgataacatacagaactcttctaggcctctgtggctgtgctcacacgatttccaattccccctaattaaaacacgggtttgttcatttgacaaatattcatttggaaaaggctatgtgcctggccttgtgcaaggctaaaatggaagttagggggaaaagatgtatttgacaaagcccctgctctcctggagctgacatttcaatggggaggtaagctattaaaacaaacacccagcactttgggaggctgaggctggtggatcacaaggttaggagttcaagaccagcctggccaagatggtgaaatcccgtctctactaaaaatacaaaaaaattagccaggcatggtggcaggcgcctgtaatcccagctagtcgggaggctgaggcagagaattgcttgaacctgggaggcggaggttgcagtgagccgagatcacaccactgcactccagcatggatgacagagtgtgactccatctcaaaacaaacaaacaaacaaaaagatgaaaaaatagagatgacggtaagagttatgaaataaatcagtggagccctatggtgagtaacacaatctggggctggggggatccaactaaatagttgggggctgcctttcagagtaagagccgtttacaccgagaaatgaaggatgaggatggggcagacaggtaagacgtggaagaagcatggggcagaggagacagtgattctaagaagtcgaggtgggagggacttcggtgcattctaggaaagccaatgctctgggaacataaggagattttttttttttttttgagaaatgttaggagataaaggtagaatgtcagtgccagatcatcatggctttgtggccatgtaaggggtttccactgtttttccaagtgtgttagtttcttagggctgttgtaacaaagtaccacaaaccgcatgcttaaaacaacagagatttatagtctcacagctctggaggccagaatcctgaaatcaaggtagggccatcctctttcccaagtttctaaggaggatccctccttttccttttacagtgtctggtgtcctgatgtgcttcttggcttattttagcttatctccaatctctgtctctacatgctgctctcccagtgtggtgtctgtgtctgtgtccaaacttccatcgtcttataaggacatcagtcatattgcactaaggaccaccctaattacttcatttcaacttgattaaatctgcaaagaacttgtttccaaataaggtgatgtcacagtcacaggtactaggaattgaacttgaacatatcttttttgctgggggagttgggggtgggggggacttacagtccaacccataataacaagtgacatgggaagcttttaaagagttaggcaacactgttgcccaacttaaaaatataactcctttgatgcctggtgagaaatggagtgaagggtcagatggaacctggagcctagtcttcccgatgtgggatgtgttggcatctgagcctgagataaaagggtgcatacgcatgtgttttggcatgagcacacacgggtagccatcacattctaaaggcaatttccattctgcaccctctgtgatgccttgcaaggcatgccttttctttgtgctttcatagcctttggcttatacttttatttggcctgtgtttagttttaccctgttttagaattatatgtgtagcaggactgtcaggagtgaagacatgtcttttgtaggagggcttttgtctaaataagaaagaggaaaatgcttgcacacacagctgtattgaagagggattgaatagtttagcgatttcacagagagtgactccctgggtcaggcccatggattcatttctgagcattgtggagaacggggaaagaagggactcaggttaaagagcagaaagagccgcagttccatagaaaccagggcacagtcctggtggtgtagggctcagggaacactgttactcagaggggaagagagaggcattcatccctgctgtcagctgaatgtatgtgtcccatcaaaattcatatgtggagacttaatccctaatgtgatggagttaggaggtgattaggtaatgaaggtggaaccctcttgaatgggattagtgcccttataaaagagatcccagagagctcatttgctcttctaccatgtgagaacacagtgagaagagacaatctatgaaccaggaggcatgttcttacaaaacacggaatctgcaagtgccttgatctgggagttcctagcctctagaattgtaagaaataaatttctcttgttcataagcaccccagtgtatggtgttctattataacagcccaaacagactaagacagtcctcctcttgcttatagaatagcttggctgtaaggacatctaagacttctcggatgcattggtatcatgtgtttgtggttttgggatcttcagaagtcaaatgtctaatcgattccagcactctttgagtggacggtggccagcgtgattgtggcaagatggtaccctcatgcaaaatcatgagattctgaagtgccatcagcacaaaagaatgggagaaatcagcttgtgaaatcattcaagaacctcatgcatacctggagaaagatctgggaaagtctagtggaagcttgctgtttcccatgtctagtacatgaacctcttctgatgttggagaaattgcccactgtatgagacttcaggaaaggccctgcctacctctgaccacagagccacaaagcaaggcacaggtacccactgtcccttctttctttgaggttagtccctatggttgtatcatctatgctcagccaatcagaaatactgctccaggactttggaagctatagaagcaaagaagcagtgacagtggagaaactccttcagagtgggtgatgatagcaagggcggtggcagaaacacccattcccatgagcagcggtggtagtaccatgggccttcatgtttggtacagatggagtatggctgtgtgatgaactgaaaaatgggcctccaaagattgtggctgtttccttatatggtaaaatatctgataaagtgaaggatcttgagaggaggagtttatcctacattatccatgtggcccctaaatgcaatctcatgcttccttgtaagagacaggcagagggtgttttgagagagatagacagaggagaaggcaatgtggccaggaggcaggatatggccacaagccaaagaaggcctggagccaccagaagttggaagaggccagggaagaattcttccctaaaacatttggagagaatatggctctgcaacacaccccaattttgaatttctggcctccagaactatgagagaatacatttctgtttttgatccacagagtttgtgataatttgttaaatcaggtacaaaaaacaaatatatcttcctgtttgttttctgggccaggtgatcccaaattcctagcaattctctgagccatcctttcaacaaattttcttttctgcctaaatcagaggcagtttctgttgcttgtcattaagagctgggattgctagagtcaatctttcttgggaggaggggatgacaatgttcagagacaaaaaaaaaaatgctgccccagaacataatctactttgtacccattttctgctgagccctagagaaaaccagcttacaatggccataatatttctgcctccttcatcagccactgctggtgccactccttcatcagtctatgtacatcatcccagggagatcaaaagtacagaacattggttaaccttagccttcagtaaggatgttaattttctcagatatgggagagaaataaggaaggggagagattttgatggggagaacacattgaaggtactaaccccatctggtgtaagtcttctcagaatgctgagcagctccttagaatgtgagtgttgcaggtttgggaccaagatggtgtgaatgagtggctcacacacaccctttcttacccatgcctgtggcagatacgactaatcaattcttgtactctttttctcacaatccttctaaaacagtgatctgaatagctgttctcaattgtttggatgtagaataggatataaaatctattggcatttttagtttgtaggcttgaggaaaggagagacagatagcacagagtaagcaacgggagctgaatgcaggaatgacttagcatctgtgaaggcctgagaggaacatcaggacattgcagtgaatctagtaggtgtatagttataactttctcctgcaggtctgttgggccaaatattgagtccgagcatggtcaatgggttttgttaagaggggaaggtagaaggactagaaggtaaggagacacttacagtgctcttgatatggttcaccaggagtctcctggactttcatgaagtggatggagaatgagagcactttaatataggtttaatgatgcaataatgagaaagcgtgcagggtcaatggaggcaaaatgataaaaggtagagtgcagaaggaagtaacagccagaacatgggatttcaaaacgtgctatcagaggtgaagtagttctgagggatggttgcatatagtcatggccctgtggaggatgactggtgtggggtggggaatggaagatgttgaacttaggagatcaagggaatgcaagttcaatttgctgcatgggtttgcaaagtggacactgagatgaagaggatttgtgtcaaagaggaaaccaatcaccaaaatataaaagaaactcaaacaactcaacaacagtaacaacaaaaccccaaatatcctattaaaaagtgggcaaagaacatttttcaaaagaagatatgtaaacaatcaacagacatatgaaaaaatgctcaacatcactaatcatcagaaaaatgcaaattgaaaccataatgatgtatcatcctactccagaatggctattattaaaaagatttaaaaagaaatgttagcaaggatgtgcggaaaagggaactcttatatactgttggtgggaatgtaaattagtgcagcctctaaggaaaacagtatggagatttctcaaaaaactaaaagaggactaccattgatccagcaattccactcctgggtatctacccaaggaaaataaatcaatatatcaaaaaggtacctgtacttgtatgtttatcatagcactattcacaatagcaaagatatggaatcaaactaagtgtccatcaacagacagatggattaaaaaatgtggtaaatatacataacagaatactagtcagccataaaaaagaataaaatcatcttttgccacaacatggatggaactggtggtcattatcttaagtgaagcaacccaggcccataaagaaaaatattacatgttctcagttttcactggttattaaaaaatctgttcacatgaccatagaggtggaatgataggtaacagagacttggaagggtgagggggtgtgaagggagaggatggtgagaaattacttaatagtataatgtacattatttgagtgatagataccacaaaagtcctgagttggttgctatgcagcctatacatgtagcaaaatcacacaggtacctcataaatttaaacacatttatagatatttcaaaaaaactacagtttttattcaaaattcagcattgaatattaaaacaaagaatatggctaggcgcagtggctcaggcctgtaatcccagcactttgagaggctgaggtgggtggatcacctgaggtcaggagtttgagtccttccagtctggccaacatggtgaaaccccatctctacaaaaatacaaaaattagccaggcatggtggctcacacctataatcccagctactcgggagactgaggcacgagaattacttgaacctgggaggcagaggctgcagtgagctgagatcgttccactgcacgctagcctgggcgacagagtgagacttcgtcaaaaaaaaaaaaaaacaaacaaaaaaaacaaaaccccaaaagcaaacaaaacaaaacaaataatatatagtttgaatacttctatgagtatcagttttttattccttgatttttcttggccacgtttatgatgataaagtataaccgaggtgtcaatatgcgttgtgttttgttttcattgaattctcccctcctccagctctaagaagaaggtaaccagaactctgtatgctttgattctctttgttgttggataagatgggaagatgcctggaagtactctcccaacccattccccattccatgtcaaaaacacatgcacttggtgtttacgacttctgtttcacaaactataactctttgatgtgattgtgccagggagaggagaaaagggagcattagtgagggtcccaacagaaaacagcacacgcacatgggctagctgaatgcatttaatgagggagcaatttacaaaattgtgggaaaggttaaaagaaacaaagaatggtgcagcactccatggctaggaacagagaggagcctttaccagctctagatctgcaaggtacggaagtgattactaaaaccagaaccagccaccagataagagctgtggcccctggtagagggagaagcccaatctgtgatgaccggacaggagagaatctgaggaaataaaacacctacttcactctattcctaccttccaatatggcaccttccattggctgaactcgtaaccccattaaccaaacccaaatcaaggccaggaggcaagagagttggttgatgtggaacttaaaggttagtctccaaatactgagtaggtggtatgcgtagctctggaggggaaatggaaaatatctagcttagggggtgagtacctttttggggtgggaaggagacaaaaaaggaataaatttcccaagacagagcagcatagtggttttgggcttcaggaccagatttagcgggattatgtgcctcagcccctattgtacccaggggtgggacagggtttcacagagcacccagaggctgtattctcagtgccaggtgtcccagcctcagacaacagaacagaaacatagaacaaacccaaagccaagagagctcctgcaggagattctgtgttgcaaaaacaattaatttatctttagaggagaaagactctataatgtgtaaggtcaaatttcccacattctcgcaggattggggttaagaattagaatgaatttgcatttagaaaaaccaagtaactgtatttcctgcatgcttaggatctgagagtgaaatttgtattgattatgctaataaatgaattcaagtataataaaaaagtcttaacagataattcagactaatccaagtgctccttcatgtctgaacctctccaatgcctcagatatgtgtgagtgaaagagggtgcaggcttgggtgcccctcctaagtcggaatgggcctaaaagcagcagagttctttcagaatcttacaggacaatgagacaacaagttatttggtgaggaaagggtcaacactggtctcagattcatccagaaatcagactactccagatagaggctctgccatcaagctggtatttttggttaatcacctgacacgctcttgattctgtctttccctggtttgagcagcggcatcaacagcctcaagaccttgaagtcaaattgtgccattggctaaaagttttgcagagctccactgtgttgtggagagctcactgtcatcccctccagctggcagcccattgtatgcctcatggaatggcttaggtgtcacatactgagatgtgagtgtcatttaaggatgcgaggagagaaggcttgaatgtgcacagagacagccaagaggatagcattagggtgggaagaactgggctttgaatcagagtatgtgggtgcaagtccatgctccagtgctcaccagctgtgtgacactggacgtatcacttaagctttctgagcctctacatctatgagagataggttatgggacttgttcaaatgtacacagatggaaagtgcagcaatccaaattctaactttgatctgtccaatttattattcgttcatcgaaaaatgtttactgaacaagtcattgtgccagatatggggaatatctcctgtcattgagccatcaaggaagaaagagcttaaacaaataataatgagtgtggttagtgctatagagaagcagagggtctattagaagaatataaaaggaagaacagtaaatggggtaaaaaatggtataatttatattctagtagaacactcactattacagctattattatctaagatgcagaaacattttatgcacaaatctattagttataatattattcataataacaggaagttggaaacaacctaagtgtccaaccataggggaccagttaaataaattgtgccaaattgttgtgttatataatagagtcacttaaaatgatgcttattatagtttatgatgttatgggggaaacataccgtaaatgtgtgaaaaatacagagcatgaggttgtttatactgtataatctcatatatacttgaggaaagagcctatgtatgtaatatatgtaaactatataattcacatgtatttgggtgaagagtatgtgaaggaagaacctagatcattctgagtagtggtggaaattataaacaattatttttatttattttttcatacatttcataaattccctagcgaaccaaaggaaaataataaataaaacctcatgcagcactaatgtatttgttgaatacctgctctaatgtcacaagaatttatgtggcccttaggaatacaggagatcataaggtatgtcaaggattcacctaggaggagcccatatgcttgctgggatacacaaaataaacatatgctgcaatagaaaacaagatgatgctaaataataataattcaggcaattcactgagtgttagcataacagcaacttgccttaaatgagcatgtactctacccgagatactgttgtaaatactttccacatgtcatcaccttgcatgatgggaacacacattactccattttatggatgtcataattgagactgagagagttacttagtaactttgctaaggtcacacaactaataagtgatgaagtcagattccaacccttgcttttttaatattaaggctgggctcctcatcattatgctgcaatgcctatgaacagctttctagggaagagaaaagttgaagttggccttaaagaatggtaggatttatagagacacaggaaccacagcagggaatggaacatgggggacacataatttgatattttctgaatacttattgggttcttctctgagctagacgtggggagaattgggtggcctcagccctgctcactgggcacattcattcaatgcatgcttgctgagctcctgctgtatgcccccacacgatgtgcaaggagaaccatggcccccactcttacgaaaaatgcaggctagtggcaggtactgacactaaacataaagcaaaaacaatctgtgaagaaaaataaagctccaattaagaaaagtgaaatgtctataaaagagtcaaaagcagatacgtgtgtcaaggatgaacagaaaggctgggagctggctctgggatctgaattaaaaatgattctcagcttggctaaggatatttggggtccattcacaggcaattctcagaataataattgttaatagggactggaacttaaaacttatctcatcaggatattggcttgacttcatctgaatctcagttacctagtctttacaatggggattataatatctaggttgcagagttgttgcgtgaatgaaaaggatatggcacataaagagttgaccacaatgcctgcagaaggaaaggagccaaagccattgttattgctttagggggcaaagagcaaaaagatggaggtattgtgacttcaaaatctaacttttcttatatgaacatgaattcttttccattggtctttgggtcctactggaatgatatatgatggatccattctttcacagcctatgctctgggaagtgcatatccattgagaaggatttgtgctggtaactgttttctctttttcctcttcttcttcctccacatcctctcccttatgttattattatgtttgcaaagctttatccccttcatatactctctgtccttctctgtaccttataaagtcaacctccatagatcccatcaactggctcccttgctattgtctccaaattgggattggcccgtgggagcttccagctggtgattggaaggaaggagtagggagaggtcagagtgtttcttccccactcccccttggtgtcctgtttctggcaatagcttcctcccattgtgactacagctctcacctgtaggacccttctccaataatacatactccgattattcttgcagcctagggatggtaataactttgcattgcaaatcctgagtaccccttgcttattcccttaactttggcccctgaacctcctatattctggtgatgctgaggatctcacctgagagtgctgctccaggtttgcctgatggtgggcgtgggcagtgggagagaaatcacagcattgacggtcttctcttctccaactcagcaccctgaatcgagttctggtcttgagtgctaattggtctgctctcctgctgaaaagtggccaaagtgaatttgtttgcaatgtgaagggaaccttgagctctggaggcccagtataatgccagtgcttaatggctctgtggagttctgctggatacaaaggagggagaagagagggcatctcttcttccccctaacatctcagcctgtgggagtgattgtatccctgccacttgtctttctaaagaggctgagccgcctgagggctcgaagtcatgcctggtcaacttcttcccttccaggcagagctttgccacctcactcctcaaaaagccacataaaaagtgagatgggattttaaagtggttttatatccctttgtatacgatatggcacatctggaataaggagtgacatggaaatggatgttggtgggcctggtgtacttcaacagatccaacaactggataagggatgacatcactggtattttcccaatatgctctggagttgtaaagaggctgctacagcagcattgctgggggactctttctaaggtccaagtgctctaagaactctgagtagaatatggaaaactgttcttgactgcctggcatgttgactcttcctgttctatagactctgtgtttctggtcataggcatagtcatatgaagctcattccccaggacatgcagatgaatccttgcatgggcctttgatcctaacaaggcaagttaaattccttccctaaattgatgttatgaaaggaatgatctctctggtctcaaggaggcatggaaaaagtcatttgcaatgggaaagcctgagaatgacacatggagaaaagtagatttgaacaatggaaaaggtgactacatagtgaccacactgttcaagtgccctgatgcagctgtatcttaacccctggattttctttttctttttcttctcaaatccttagcttacttgctggctgtttacctactctgagttacagttctaagagctttgacagatacagtgtttctacaaaaaattctatggctagtggagcctgtatagacttaggtaacagtgaatgagccctgactccacccattttatatcaggataagttctctaacttatgtgactctgatcacgaagagcgtccactaggaaagacttgattatcttccaaaattgtctgcaaataaaggtacacaggtaatcccaaatttatcaaagttgctgtagccagggcaacactccttgcctttgcctgcctcaagctaggaggtgatggggactacaacccctaaggtgtcatctgcctttcaggggcaccaggatcctggttcagccaggacgagcatcaggcctgccaaagcaggtattcaacaaactctataaggtttgatcacaactagataaaacaaactaaccaaaatatcttacatagaaaaaatactaggaggaaatgcagtgaagtgattacatatgttttcttttcttttctttctttttttttttttttttttttttttgaggcggagtctcgctctgtcgcccaggctggagtgcaatggcactatctcggctcactgcaagctccgcctcccgggttcacgccattctcctgcctcagcctcctgagtagctgggactacaggcacccgccaccacgcccagctaattttttttgtatttttagtagagacagggtttcaccctgttagccaggatggtcttgatctcctgacctcgtgatccacccgcctcggcctcccaaagtgctgggattacaggcgtgagccaccgcgcccggccatgttttcttgtaactaagaattttttccaatcccctaacaatttttgatattttctaaatgttctaaggtgaacttgtattatatttataatatagaaaaattctcttatgtataaaacaacatttgttaattgaagaaagtgtgaattgtcttccactgcccagaggaaaatgtgagaaatccctggaggaaataagtagagagaagtagaagtccctggttattttttgctctcagagcttgatgtgttgagaattttgtgtcaaggtctttgacctatatcctgaagccttgctctcacctctcaccagtaggatttaggggcaaatggcagagagtgctttgtggattagcaaaatcctaagtggatatttttgcaccacaaattgcatccatgcaggtgtgaggagttggatttctccctgtgcccacttttctattctccttaaagaagatgagctgttaaccagaattagtctctgttctcctgtactctttcaggtttctctcatagggaaggaggaagagtctgtaaggaaggacatcaggagacactttgcaataaggatcatgtcagcggttgaagcaaagcagctgaaacgactcagcctctgataacacatcttctatcagcctatttacttatcctatggactaccctgggacagcagttctgattctaggactcccataaaacccagggcagattcactcagttcctccaaacctctgcctgatcctctcctcccccatttccatcacataattcctcatggtgagaaagcaggttgtgtttatttagataaagatatattactgtaatagaattactaattatgttaaacaactttttccttaaacaaaacattccatggttggggatggaaaccattagtgtgagtaggaggagggaggaggagaagagggaagttgtgtttttctttccccctgatttatgaaggtgtgataatcttggaccgctcacaagttgagcttttccgtggataactggattctgctttgccagctataatttgaagcaaattttgctctaaccaatctcctcctccacattaatgtttattaaaagtcagccacagcacatacagatgcctccaacaccatggccatgcccccagggccaactccaggttattgcaagggaggtgggaactcctacctctgctttgctttcacaaagcatgagcaaaataggaggactggggagggaatctgtagctccgtactgaagtcagcagacaatgctgctttgggggttgttggtattacaaatgttatgtaaggacacagcaatactatgagtctttagtctggaatcccttaggggaatatgaggagaagggactgattactatacactcaacatatgaagctttgggaaccattgtaagcgtttccttttatttcctgcatgtgtctttccttaattttctccactgagaagatcatccttaccatctctgcctacttcattgagccaacagacttgggttggattcccccaaaagcaaacttggagacaaggatgtgggtgcaagcagttgatttaggagggggtccaagaaaacactgttaggggagtagggaagtgatatggtttggctgtgttcccacccagatctcatctgaattcccatgtgttgtgggagggacctggtgggagataagtgaatcatgggggcaggtcttaggtctttcccatgctgttctcaggatagtgaataagtgtcatgagatctgatggttttataagggggagtttccctgcacaaactctctttgcctgctgccatccatgaaagacgtgacttgttccttcttgccttctgccttgattgtgaggcctccttagccatgtggaagtctaagtccattaagcctttttcctgtataaattacccaggtatgtctttattagcagcatgaaaacaggctaatataggaagtaagaaggaaagagaatgagtcaacagagggtccactgatgaacaggtttctgctattggtaactgtgattcattctcactagatatctcagaaagtctgtatagtacaggccttggagctcccaggactgaggactctggggtatcaatctactaacttctgtctatcactgattaagggctgcttctggagtgttagtttcttggcacccctggtctgtcctgcacatgagaacactcctgcagtgagaagatggggtatatgtacttttccctgttcttcccagtaagcacaactaaaaatcctggatattatgtgtaaaacaaatatactaatattctgacaggaggagagaagaaggcagactggctaggatctcaacacctgaggaatgatatgatggtgaattcctttaagcttccattctcccagctgggcacggtggctcacgcctgtaatcccagcactttgggaggccgaggcgggcagatcacgaggtcaggagatcgagaccatcctggctaacacggtgaaaccctgtctctactaaaagtacaaaaaattagccaggcgtggtggtgggcgcctgtagtcccagctactcgggaagctgaggcagaagaattgcttgaacccggtaggtggaggttgcagtgagcagagcttgcgccattgcactccagcctgggtgacagagtgagactccatctcaaagaaaataaaataagaagattccgttctcactcatatacccaagacactgcactgaagaatccagaaacctggaaacacgaacgtgcagattttttttttaaaccatcaccaacaagattattaatatgttaaatgcatcttataaagatgtttaaaaatccataataaaaatatttcaacaagcaaatataaatgtgtctaaaacaaataaaaaataaaaagcctcagaaaggaaagtcacagttagtaaataaaagatacaaataactgccacatgaaaattttagaactgaaaagtatcataccaaaagaaaaagctcaatatatggattcaacagtagaattaagggaacagaggaaggaatcagtgaacttgaagacagaacaatagagaatgctgaatctgaacatcaaagacataatagactgaaaaaaattaacagagccttaggcacctatgacactgtaacaaaaagtctaagatttgtattattagatacccaaaggagaggagaaagagagcacaattgaaaaaaaacttgaataaacaaatagtggctgaaaacttcccaaacttgctaagagacgtaaacatacttaagaaactgagtgaatcccaagtagggtaaacctaaagaaatctatgtctagacacaccaaaattaaatttctgaaaactaaagacaagaaaaaaactcttaaaagcattaaaagcagtcagagaaaaccaacaacttgcctattagggagaaacaatttaaaagatcatggattttacattagaaagcatggaggccagaagaaagtgacagagtactttccaagtgctgcagtgaaagaaccatcaactcggactcctgtatccaatgaaaacaaccttcaggaacgaagggaaaatcaagacactctcagataaagaaaaatcaagataattttttacccatagatgtaatctaaaataaagacaaagggaatttgtctaaacaaaaaagaaaaggataaaagaaaacaaagactgtattaaggtaaaaaataaaagaaaatgtaatagattttccttctcatctttggtttgttgactaaattacatttgttgattgaacaaaagctatgctatctgatgttaatatggttctcatgtatgtaaaggaaacagttcagacaattatgttgtaaatggaaaagggcaagacaacatagaggcaagttttcttcaattcacttgaactcgtaaattatcaacaccactagactgtgataagctatatatatgtttaagaaagctatttttaaaagctatttaaaaagatgcacccaaaaacactatgattaagtcgaaataaaatgctaaaaactgttcaagtaactcacagaaaggcatagagaaaaaataaaacagatagaacaaaacagacaacacaaaataaaatggcaggcttaaagcctaacccatcaataatcacattaaatgtagctatttcaacacaccaagtatgagacaaagattgggtaaatgtaaatgcctcaatataccaattaagagacaaagattgggttagaaaacaagaccaactatgtgctgtctacaggaaactaatttcaaatataataaaataggtaagttcaaagtaaaaaaattaaaagaggtctatgtactatataaatattaatcaaaagaaagcagcagttattatattaatatcagatagactttttaaatcaggaagtttatctctattattattatactttaagttttagggtacatgtgtacgacgtgcaggtttgttacgtatgtatacatgtgccatgttggtgtgctgcacccattaactcgtcatttagcattaggtatatctcctaatgctatccctcccctctgcccccaccccacaacagtcaccagtgtgtgatgttccccttcctgtgtccatgtgttctcatcgttcaattcccatctataagtgagaacatgcggtgtttgtttttttgtccttgcgatagtttgctgagaatgatggtttccaatttcatccatgtccctacaaaggacatgaactcatcattttttatggctgcatagtattccatggtgtatatgtgccacattttctgaatccagtctatcgttgttggacatttaggttggttccaagtctttgctattgtgaataatgccgcagtaaacatacgtgtgcatgtgtctttatagcagcatgatttataatcctttggatatatacccagtaatgggatggctgggtcaaatggtatttctagttctcagatagactttagaccaaagaaaactatcagggacggaaaggcacatcacataataataaaaggatcagtgaatcaggaagacatagcaaacccaaatgtatatacaatgaaaaatagagacataaagtaaggaaagcaacagttgatcaaattgaaagaagaaatagacaaattcacaattagagttggggacttcaatacccctctttaacaaatgatagaacaactggacataaaatcgggaaggacatagaattcaaaaacattaacaaccaacaagatctaattgacatttataaaacattccatccaacaatagcacattatacagatggtccccaaattataatggcttgactcatgactcatggtgtaaaagtgatatgtattcagtagaaaccgtcctttgaattttgaattttggtcttttcctagcctagtgatatgaagtacagtactctctcatgatgctggtcagcaaaccccagctcccagtcagccaaattatgtgggtaaacaactgatactctacagcatgctgtgttgccagatgattttgcccaacaatagggtaatataaggtgttctaagcacatctaaggtaggctaggctaggctataattttgataggttaggtgtattaaatgcattttcaacttaatattttcaacttatgatagatttatcagaatgtaattccattgtaagtaaaggagcatctgtatactttttttaaatgctcacatgaaatgtatataaagatagaacatctcttggatcatagacagaactcaacaagtttaaaacaattgaaattacgtagattgtttttttctgaccacagtgtaatcaactggaaattaaagaaagagataacaaagtattctccaaccacttagaaacaaaacagcatacttctaaataatttatgattcaaagaggaagtctcaagaaaaatttaaaaatacatgggaaattttaaataaaaatataatgtatcaaaacgtttgggacacagctaaagcaatgctgagagaaaaatttacaggactaaacgttttattttgaaaaaaggaaagatttcaaataaatcatctcagttgtcttctcaagaaattagaaaatgaggaataaaataaaaccaaggtgagcagaagaattaagaaattacaaagatcagagtagaaatcaataaaattaaaaacagaaaagcaatagagactatcgatgaaacaaaaaactggttctttgaaaagatcagtaaaattgacaaacttctaacaagactgatggagcaaaaaatagacaagacaaaattaccaatatcaggaatgaaacagagggtatctctacagaccatgcagacagcaaaagaataacaatgaaatataatgaagaacttgacacacaaatttgagaacatagatgaaatggaccattccttagacaatacaaactaacacagctcacctagtatgaaatagataatttatatagcccaataaccattaaaaattaaaggtatatataattaaagccatcagaaagaaatcttcaggttcaagtgttttcactggagagttccactaaatgtttaaacaagatttaatgtcaattctatgcagtctcttccaggaaataaaagagaactgttcccaaataattttataaagccagtattatctggataccaaaaccagacaagaaaggcaaaaaagaaaaaaaagtgttgaccaatatctctcatgaatatagaaacaagttattatgaaatgttggcaaatggagctctgcaacatgtaagaagaattataaaacatggctaagggggggtttattccaagtatgccaagactgttttaatatccaaaaatcaatgtaatccccacattaacatactaagataaaaattgtatgataatattaatggctgtagaaaaagctttgacaaaattcaataaccattaatgataaaaactctcagaaaaacagaaataaagtagaacttccttaacttgctaaagaacacctacaaaaaaatgtttaatgtaatattagtggtaaaagattaaacatttttcctccaagaatgaaagtgagacaaggagttttcttaccactgctattccacatagtagtggaagtcttagccagctcaataaatcaaggaaatgtaataaagagtacacaaattagaaatagatgacatgataattgtcatagaaaatcccaagtaatcgacaaaaaaactgctagacataagcaaattaagcaaagttgcagggtccaagctcaacatacaaaagttaattatatttttgtatgttaacagtaaacatgtgaaaacagaagtttcaagtatcatttaaatcattaaaatattgaagtgcttaggtgtaaatctaacaaaatatatacaggacttgtatgctgaaaactacacaatgctgattaaagaaatcagagaagatctaagtaaatgaaaagacagaccatgttcatggattggaaaacaatatagtcaagtagttactactcctccagttgataagttagtttaacattcttataaaaatcatagcatttttgtatagatattgaagagattatccgaaaacttaaatggaaagggagggtaactagatagctaaaaaacaattttgatgaagtagaataaaactgtaggacttaatatacccaatttcaagccttattatatagttacattaatcaagactctatgatactaggtggagagatagatacaaaaagcagtgtaacagaaaagagaagtcagaaaaaggcccacgcaaatacagacaacagttttcttttaattaaaattctgataaaggtagttgtagattcacatgcatttgtaaaactaacatagagagatcctttgtaaactttgcccagtttcccccaatgataacatttgcaaagctatagtataatttcacaaccaggatattaatattgatacactatattagctttatccagttttatttactcatttctatatatgtgtgtgtgttactaagtttcatacaatttatcacctgtgtaggtccttgaaccccctatcacaattaaaattctaaatagttctaatgccgcaagaaccccttgggttgttgttttataaccacttccctcctgttcctttgaaattccctctctcccatccctaactcctggaaatttagaatatctccactgtttataaaatgtcatcattttgaaagtattatagagatggaattatacagtaagtcaccttttggagaaattcttactcagcagactacccagagttgatgcatatagcaacaattcattcttttttcattgctaaacagtattccattgcatgcatgtataaccattcaccattgaagggcatttgggcagatttcagagtttggctgttacaaataaagctgctgtgaacatgcctgtacaggtttttgtgtgtacagaaattttcagggaagcgcaagtgagatgtggcacaagacagaaggtgcttgagtaaaattatttgaccctgaatctagctatacctgaggtcatcaacattcccttcaacttcttaattgtgagggagtttatatcacttgttttatattactaaaaagcagtcacttatcaggtattcacagtgggtcatctcttatgtctttgccccaaaaagtacaaattactttttaaagaagtttggcccctggaggccaatgaagagttttagcaacataagcctgttacatagaacaggggagaaaggttcctaatgcattttgtacttcattctatagttagcttttgaaaatatttggcataaagtaaatacttactataaatatttggttccaagataaatgctcttggtattctccaaagtctgtggtggccagtagggttcaggaaccctgacatgactccacagtggcccctggaccacggaaaagctgccgatggctgtgatgatctgtggtagctgatggctggtcgtggagagaggatgctgggtgatgacagcactgtcaggggatgatagaccaggtccagggccccatagattgctatgtgagatagtggtgttggctgtcatctgatttgtcattattaagaactgacttttggccaggcctggtggctcactcctgtaatcccagcattttgggaggctgaggccggcgaatcacctaaggtagggagttcgagaccagcctgaccaacatagagaaacccagtctctactgaaaatacaaaattagccaggtgtggtggcaaatgcctgtaattccagctactcaggaggctgaggcaggagaattgcttgaacccgggaggcagaggtagtggtgagccgagatggtgccattgcactccagcctgggcaacaagagtgaaactccatctcaaaaaaaaaaaaaaaaaaaaaaaaagaaaagaactgactttttcaaggtgtcagtagatttggtgaataaaaaaaaggactgacttcattcaggtagagataaactggcacctgagcctctgtccttctggaagagaaattacatatgtttcggaagctcagaataattgagagcaaatttgcatttaacttcaacagaagccagtttggacactgaagtatcaatatataaaaactggagatcatcaataaagaactagaaagatagacatctttatttgcgtatggaacagacactttccaacaaatactaaaagaagatgaatctcaacatttaaaacaagttgatgaaaatagataaattggatgatatcaaaggacaccattacaccagtcagtaaaacacagtaaaaacacagttttacaccagtaaaaacacagtccatgaaataggagaaaatatttgcaagtcatatgtctgaaaagaagtcaatatctagaaaatatagagaactctcacaactcaacaacaaataacccaattaaaaaaattggcaatgaacttgaatagaattttttgtaaaaatggcatataaatgaacaataagcacatgaaaagatcttatcatcactaataattaaggaaatgcaaatcaaaaccccagtgagataccacttcatacccattaggatagctattatcaaaacaataaaacacacacacacatacacacaccacaaaatgacaagtgttggcaaggttaagaaaaaatcagaacccttgaccactgttttgagcactgtttctgggaatgtaaaatattatgtatggaggttccctaaaaacttaaaaatagaattgccatgcgattcagtaattccacttctgagtatatactaaaaagaattgaaagcaggggtttgaacagatatttgtacatctatgttcaaagcagcattgttcgcaatagccaaaagatggaagcagtccaagtattgattgacagattaatggataaacaaaatgtggtatgttcatacaatggaatattatttagcctccaagatgaaggaaattctaacatgtgctacagcatggaggaatcttgagggcattttgttgagtgaaataagcccgtcacaaaaggataaatactaattccacttatatggaatagagtaatcaaaatcatagaaacagaaagagaaatgttggttgccaggggctggaaggaagagaagttattgtttaatatgtacagagtttcaattggggaagatgaagttctgtagatagatggcagtgacggttgcagaaccatgtgaatgaacttaaaatgattaaaatggtaacttttatgttatttattttactaccagagaaaaatagattttataaggttgatatttccataaagttacagttatttcaagacaaatctgaaaaatgcaaaagcaagtagttcccaccatggcattgttcaaaattcatcagaaaaatgaagagccgtttcaggcagctctaaaaaaattctttgaaggtgaattccagtcttcagggaaatctgaagtggctttctcaagatgctgagagaacaaaaggatgagagagtaaacttattattcagaagagaaaaatattaggaaataagaaaggccacatctctgggtggacacctgcaggagctgagtgattgggatcctgctttggtgggggcagcataaatggtgcaaggctggaagccaccagaaaacagagaccatgaaagtaaaaaaagtcacaggcactggcaaggttgtggagagaaaggaagtcttatacactgttggtgggaatgtaaattagttcagccattgtggagtacagtgtggtgatccctcaaagacttaaagacagaagtaccattccacgcagcaattccattactgggtacacacccaaaggaatataaatcattctattataaagactcacgcatgtgtatgtccatttcagcactattcacaatagcaaagacatggaatcaacctaaatgcccatcaatgatagactggataaagaaaatgtggtacatatacaccgtggaatactatacagccataaaaatgaatgagatcatgtccttcgcagagacttgggtggagctggaggccattatccttagcaaactaacacaggaacagaaaactgaatgccacatgtttttacttacaagtgggagctacatgatgagaaaacatggatacatagagggaaacaacacacactggggccttctggaagatggagggtaggaggagggagaggatcaggaaaaataactaatggatgttaggcctaatatctaggggatgaaatgatctgtacaacaaaccctcatgacacaagtttacctatgtgacgaacctgcacttgtacccctgaacttaaaagttgtttttttttttttgaaagaaaacagaggccatgtacaacatgagtccaaatgagttttgaatgtaacaattgatgtgattgagttaaatacttatttaagatctcttgaagaataaagaaattataatttacatgaaattaaccaaaaaagattaaataattgttgcactttaagatcattgaaaagtctctaaactagtaaagctttactgaagtcaagagaaacaaacaaacaaataaacacaggcagaggcaactacttcagaggaagcttccaagttttttcagagttgcatcaaggggagaaaacaaattttcactaaatgtacgatttagagagaatttttgtttttttttgaatttaccctgtaaagatagaaaggaatctttcaaaagcagatgacaagatcagccatgcatgtgataagccaggcacctgtaaatgcaatccaaaatttttccagaaaaattcaaaagaatatgccggctattattgaagccagcttatttcctatgagagaaaaatctcaagaggtgttgagagttctgttgctttaaagacaccttcataagttaagagaatgcatccctgagacaaaacaaattgagaaaggtggtataagttttgaaaagcatccttaagtctccattgttgcaaatggggcatttattagagtcctgtgagatcatgagggaatgctctggaggaccagatcactaaggaaggaggatcatgggctgtggagggatggagatccaggatccagtgcccgctgtgggcagatgccatcctcccaggagaaggaaacttctatcaggtcaactttgttctgacactgcagctccttttcaagagcatgagagagcagttctgttgctcctggaactggtcatggcccagagtctcctttcgatccagccctcccaccagaacagtgtgctgctcacccagtctttgttctctacccagtaccctagtcagatggtagatgtcccagagatattccaaggtacatctcctgagaaggggatacactgaacttccctctatcccaagaaagcttggaagaaactgcctaggggtcttccccactgagggatttccctggctgggcacattctccactagccacaggaaagatctctggaccaaacactgcccacatggtctgaaagcagaagtgagtcatctccaagttgaccctatccccaatgagtagacttctgaagatccagaaccacaagatgtttttttctgtcaactaaaatcattttaattgtttttcttttacttttactgctattaagtaaatggcttaaatataaaccaggtagagctagaattctaaggtaaagttctacgactgtggatcatttaaacatgactcttatgagttagctgcttccattttattctatttttaggtagtgttattacagtagttttcttgttaataaatccacaatataatctgaaacagcaagaaatttgtcttttttctaataataaatttattttttttctcttttggttttattgctattatttatatgtttatataataccttaaatggagatttgatcagattatgacttttaagatagtattttataaatgtagattctatacatgtgaatcttgggattggaaatgacatcagcagccacactgacaagccttgctcttctccatggtgtcatctccatcctcagccactacctagctatgtccagtgacagctgaaattatcacaatggattagaactctccgttccttcagggaagggtcatctggaccaggagaaacaaggtcctctgttaagacccagccctgccgcggattgaccttggacccctgactgctttctggctcagtttcctcttaccactgtcttgtggcagagctgcatgagacttaaacaaggtcatgagcatccagttgtccttcaatctggaacccactgcaggaagcacagccagacttttgagagtgcaagagttttcagacagcacctctccatcctgctctctttctgattcccttcatatcctcctcctcctcccccttctcctctttaccaccaccagcactgttatcattgcctttatttcacttccccacatctgtctctgcacttacttcctttttttctcatgttcaacacatgcactgagcaaatttgtcctcatcccctgggtattattgctggatgtctatcctgcctatatctggacgaatcttattgctggatgcctgtcctgcctatatctggacgaatcttattgctggatgtctgtcctgcctgtatctggaccaatctactgtggccttggggtctcatcaggccatctctctaggcctggaatctggaccatgaaccccagcagtgcctactgctaagttcctacacaaattcagctgcctctagatgcctttgtgcaaactcccatcatctcccctgcaattattttttacttgagatggagtctcactgactttgtcacccaggctggagcgcagtggtgcaatcttggctcactgcaacctgcacctccctagttcaagcgattctcctgcctcagcctcccaagtagctaggactataggcgtacgccaccatgcctggctaattgttgtgtttttagtagagatggggtttcaccttgttggccaggcttggcttgaacttctgactgtgccatctgccatggcctcccgaagtgctggggttacaggtgtaaaccaccatgcctggccttctcctgcaattctgttatagcctccagctccttatccctccctgtctaccttcacaacggtgaagtcagggtaaacttttagaaaatataaaggagatcatgagactctactgctcaaagccctccatgcccccaaatcacactgaggctcaaatctaaacattcaacgaaggtccaccaggctatggataacctggtctttgcttgtctctgtctggcccctccaatccggcttctgactttccttctggaccaataacatgtcacacttacactgcctcagagcctttgcactggctgtttcctctgtctagagtgctttccaccaattatgcatgtggctgcctcccttttctcattgacatcccagcttatattgaatgccctccatctctggcttcctctctggtccccagccttatttatggcttcagactctcatcctctcttaaatcatttaatttccatattattatagtttatatcatttagcccttcttatgacagtcctctaggatagaggttgttgattttagaaaaaaggcaaaattgttgctgtgtttctaaatcattttagtaaacttattaaggtaaatattagtaatattagtaaacttatagtttactagttatagtaacttatagttactaatatgctaatattactaatattagcatattagtaaacttattaaaataccactcattgtttgcactcccctctggaaggtaaggaacagagagtttatcttattcaccacagacactgcctttgtatcttgcacatgagagtcactcacttaagatttgggaaggaagggatacatagaagtgaatccagtgcaaagacctcctgagatctcagatctgtccacctgtcagggcctcccagagcaggttctgtacacctgtgggtgtcttcatgaaatctcaccttggatcctggtgctcctcactgtctgcacattctcggagcatcctcgtgtgtgggtttcaaccagcccccttctgacattccatgcctgcgagtgttaagtctccacattaacgtgattcatacagatggctggggaatcccaaggttgtgggaacagcagaaggagatgctatggaaaaagacatggtacggtggccacaggcctcctctactacagtattgagcagcaaaaggctggtgcttttgtgttaaagagaaagccactggacttcagggacccagtccatttcattgtcttggagagaagatgcagaaatatgcaagtacttacaatcaactgttatctggatttagtaactaatatttatggggtactcactcatgatgcacagagtgctgtataaatgccaggccatcttctagttgtgactacccttatggctactctctaagatggggatggcattcagagaaggaaactgaggttctaacaagctccaaatcacacaatatagacgggcagttgacagctcagagtgcctgggaactaatttcaccttcgtggctctccagcggtgaattttgggtgtgttacttaatgcttaggtctcttgactttctcatctgtaaaacagatgagggttgctgtacaagttaaatgagtccatgtgaaacactcactacacaggaagccctccatagatgttgctgttttttttgttattctactagaagtaaatggcctacttggtattgaatctgagacctctgtccctaaatccactcactttctactctttgaataactgtttttgtttaactgtgtttggtttgttgattgctaaaccagtggaagaacacactttcctaattgaccaggtatgcagatgagatagttttggaacttttgacaagctctggctcattgcagtgacattatttaagttccaatttccagcgaggctggctattctcagagaaatttgattcaattccacaaacacttctcctagtcattaagacacctaccaccagaaacatctggtcaattaaatttaaaacattagtcaaacaagttgttggtattatatggtcagacatctggacaaataaaattttaattgaatgttttgatatcatgtggtctcagtttcaaagccaacccccaaatagaaggcacatacctttactttctatgccaagttgggtgggctgggtttggtatatcaattcacttttaaaaaatttaccaaattgtaatgttacagatatagccaccacgcaattgggattttctacaatagtcctgatttttaaaatattccattcttttgctggccaattgacatgccccagttttttggtagacaatatggtccgtatttgcctggagtcatgagtagaatgcaggaagcctacgttgcaattttggatctggttccatttattctgaaatattcagtgacacatttaacaacttttccccctcaggtttccctttgataacatggaggagtcactttgtattttctaacttaaagggaaggctttctgtagaaacttacgatgttttatacatttgtgagcacacatgtttacatacatgtgtgaggcacatgtagacatactattataatgaatcctcaggaaaccctgtttgccaagccctagtgtagatgaatgacaacagtggcatggattagggttccagcagtggacatacagagtagtgggcagatttgagaggtgttcaggagccaaaattgctggtgtctattaatgcacgagctaagggggcggatggattctgaagaagtatttccactaccaagaaaggcaatgttgggaagaaccttttggtcaacttggtcaacttctccagttccagtagagcaatccagcttcttttgtcatctcctctttatctttcatccagagagcccacataagcactgtttaaatttctcttgacttgtcttactcctttgactcatcgaaaactatcctcgcaaaagaaatttctggcaggtcatgtaatgcaaaaaaaaaaaaaaaaaaaaaaaaaaaaaaaaaaagaactcaaaaacaccgaaaacaaaaaaacaaaatcaaaaaccacttttggacatctgttctgatacagaagccaagagcagggtccgcatggtgccagcgtggcagccgtggccgcatattgcagtcagaatgtgcatggtgccagggctaatgatccgggtttcctgcagagggccgctctgccagccttctaattaggatctgctcagagcagcctgggcagggatgatcacgccttttctcctgccctcctctccctcggttgtcttcctcctatgcagcaatttagcattgtgagcattttttttttttttaaatcctgggccatttaaacaaaggggggaagtaaagcaggtttctccagagatgctggaaaaagggacgagaaaccaaagctgatggcggtggatggatgaagtcccagccaccctccgtggaagggtgcagatctcctttaagacctctttggtgaagagtcagctgaaggtcctccccagcataaggcccagagatccagctgctgctgtgggaggctcagcctgggctcctcatcagtccactggtctcagagggtcatcagcgggaagtgatgagcatcttggaggtcaggccggatgtggcgaacacccactggtggtcaggctgtggtatgtcagggaagaggatgttcctctaacagcctaaaccaacccatggaggaagtttgggaagtcatggattattgtgtgttggttttggtttggacccattaggggcactggcttttagacaacaagtatgggggcgggggaagtgtgttgcatggaggagctttcaaaaggtaataggtaagagtagccctgggccacagcccagaagtcttgaatcatggaaccaagactggaagctaaatttcagcagaaattgtatttgccttgtttactgtgatggctcagtgcttagcacagagcctaccatatggcaggtgctcaataaatgagttaatcaacaaaaagagcatcatcatagtggctacgttctaaggatgtggtgaagattcagtgagatactgggtatcaggtgttcagcaccatggctgcacgtggtcactaccgctagtacaactaaagtcaaacactagtgcaggggtcaggaaatattttctgtaaagggccagatagtacatattttggactttgcaggccatacacttctgtgacatttatggaactttcctgttctagtgtgtaagcaaccatagaaagtaaataaataaattgatgttgctatattccaataaaactttatttataaaaacagactgtgggctgaatttggcctgtggaccatagttgcctgacttctgccttagaaaatgacaaagtcaagggatctgttcttcacagagagggtacaaatgcaaatatgcctagattcaggggaagttcatggatatccatgaggaatagctccagcccgagtaaaccaggtaaatgcaaacacaactaacatagcccctcacctgggagactgatgacaagaaggatgcaaagagcatctgctagcctcctccccacagcttctgagtgccagaaacagaatctacacatacttagttttcactaacccacatcggtttctatgagtgagtagcattcttcttcatgtgtacagaacagcagaagatggaataattagaagcatgtatttatccctgaggttccctcatttgtatattcacatccctgatgatgtttaagacctcaggtcactctagtgaaaattgaaagttgggaggctttgaaataagagtaggcccattagtcactcaacaaaccttgtctcctatctactaggtgctaggcattgtgcctagtggtggaaatatatggttatgatcttatcccagacttggatgagctcttggtctagttgaggaggcagggatgaacagagaattaattgtaacaccatgcaactaatgaggcagtaggtgttacttacatttacatggcagggagtggccatctgggctcagggtgagaatgtgtaagggaccgtttcccaggaggtgatctttgagccccgtaatggagtctcactgcactcatgtacacatactgcttttagaattgatttgttttttctttgcaggaaggatgcaccctaaaaaaatgttgagaaaacagtctaacctagttctcccactaggacattttggaggtaaaggagaaatgccagagaaatgcctctactctggattacacagttggtctgtctctactcaggccttgatgtgaaaaggcagggacagtgaaacactgcgagtagaaaccaactgtcctcttgactcataacttttatattgacttgtaagtcagttcttccatggtggaaaagtaatacagacgttgggcaaaatatgtaatgggatttaaattgtagccttaaaggtagcttaaatgttccatagaaaatgctccaggataggaaaaaaggatcttgtgatcgaaggtttatatttataaaatttgtccttttacaacaaaggataaacagtattttctaagttttttttttcatctgcttccctggttcccccttcaggcccactttaacctcaccattcttgataactattttcaacctaaatatgaacaagtcactccttggcttaacaccatcagtgggagccttttgtccacaggacaaatcctcactcaaggtgctttgttctgtttcttctgcagctccagccacatcaacctaataataacaggcaccagcccatgaattctaccatgggtcatatttctcttggctatttgcttatgtgaccatttgatccctgccataatcctaggcagctgttttataaaggaggaagctgagattcagggagatgcagtaacttgcccaagatcaagcaagttttcgtggaatttaatcaaaggtctacctgaattgaacttctgggactcttctacaatattcttctgcctagaacattcttcatctcatttttttttcctacaaaatcgggcccctttagggtttggttcagacattccttcaactatgagccattctcagtctctcataccttccttttgactttcaataccattttgttgagggggcaggtaatcctcacaacactggcaccattgtattattccaatttctttgcctttctcttccatgtgatacattgggagcatcctgaaagcaacttcattatgtaatctatttttatatgctcaggcctagaatggagacagaactttgaatatgtatcaaatgactatatgactaaaaaataatattctaggatatgtgtatttgggccatacctctcaaatgcagaaataacaacctttaaaactgtgtgctgatggagactggatgctgcatgtagaatgaatgagtattcttttcttgttatgctctttgagtggtgactggagcgaccgactggttggggctggttgtcctgtccagcatctcagaaatctctgaaatccatcctaaatgtctaaatgaagtaaagtggttggctttataagtaatagaagtcaattgtgtttgcagtctctaatgcaagaacggcattagatgactgagatggggctagtgccaagaagtgctgagtgggcaggaggcctgattttcagcctccctctgcatccatttgtgataatctgagtctggcgctcaaccagtcatcctcctaacgaggcttgcatgagacagcctttgcccccagcacagacatatactgaatcaggagttcccttatacagacatttaaaaacacccacacatatgcacacactcactcacattctttccaaatacacattttatcttccttgttacaaacattgtcctaacaggctggcaaacattcagacagaaactgaaatatttagatgaactggggcaccttaactcctctggaaaatgacttttagctgaaaggcagaaggaagctgatattctgccttgatcctgtgactctgagtcattgatgaacgcttgccttttggcttgagggtagggcatgagagctgcaagcaaagattgaaataacactcatgtttgttctacattttacaggggagctggtattgtctcccagcaggaaattagatgatattcactcctaggataataataaggaagacattaacaataaagatgaacatttatttcccaccacattattctaagcattgacagcattaggtgatatacccataatgatcatctgaacatataggtgcttttattatctccatttcacaaaatggagaagccgaggcttagaggggttcacaatttgctcaagatcacacagtcagtaaggagcccagcctgaagtagcatatatatatatatatatatctatatatatatatagatatatatatatatatatctctccacagaacctgtgtattttttttccgtgctcatcacccaggctggagtgcagtggcacgatcttggctcactgcaacctccacgtcctgggtacaagcgattctcctgcgtcagcctcctgagtagctgggactacaggtgtataacaccacactgggctaatttttgtatttttagtagagacggggcttcaccatgttggctagactggtctcaaactcctgacctcaggtgatctgcccgccttggcctcccggagtgttgggattacaggcgtgagccaccgtgcccagccctgggttcttaaatgctctgttttacagagcagggaagctggcctgctcaaatttatttgaacgagattgtgagaaaccatctgagagtgaactcattccatggaaacaggatgtcaggattgtcaagctttgccctacaaaacccttagcagtttcaagtagggggattatttgagggtgcatcctggtgttggaatgttagatgagccttttggattatctttctataatcttatgctgggaacctatgaatgccacaatgacaagtatgactagaaagaattcatactagaggccgggtgcggtggctcacgcctgtaatcccagccctttgggaggccgaggcaggcggatcacaaagtcaggagatcgagaccatcctggctaacatggtgaaaccccgtcctactaaaaatacaaaacattagccgggcgtggtggcaggcacatgtagtcccagctactcgggaggctgaggcaggagaatggcatgaacccgggaggcggagcttgcagtgagccgagattgcaccactgcactccagcctgggcaacagagcaagactccgtctcaaaaaaaaaaagaattcatactagaaaatgtcaggagacatacaggatgctggcaaggctactgtgggggctctgctcccctgaaagaagttgacaataaaaagaggggagggaagggagtcatcctagaacagtctgcccatagccagacatatttatgaagccatcctagatcaaccagctcctggcctgtccccaagctaagtctagactggaaggatggcgcagccaaaccaccaagttatttataaaatcactgttttaagacagtaagtttttgtaatggtatgttacatagcaaaagttaaccgatacatctcttattgcaactctacagaattaaaaaggacaagtattataaatcagaagagggaattgaatatctcagaggattcagtgactttcctaaggtgctaaggccaattaatggcagaataatgactagcagctagggcaattcacaagaagtcttgcaaataaaggaaggtagcgtgtactactccaaaacatggtctgaatcattatcatccctatccttgttttaaacttctgtggaggaaaaagtagccccaccttccagaaaacacaatgtaaatataactgccatcattgccatcttcataactagggaagccataggatttgccctacaaattggactctttgagaataacagggatgctactaataactatgccaaaaatatttatttcccaccacattattctaagcactgacaacattaggtgatatacccataatgatcatctgaacatataagtgcttttattatctccatttcacagaatggagaagatgaggcttatttaagcaagctggctctatggccaccctatctctaactaatatggagagagcactttatgggttacaaacccttttaagataattatatttcattttacaaaaaaaatccttcattgtaatcacaacaccctcattttgctgaaggaaactcttattttcagagaaatgaagtaacttttctatggttcttgacagtaggtaggcatttaataaatgtttatgtttattaaactggatgaatagcagttcagtgggtggatgaatgcatgcatatgtaagaataaatgcaagaaaaggaagcagaaagcctgaccacatggtgttttcaagaaggtgtaaagagaagacagtaagtagctaaatggatgactctcacactgagttccccagaacatcaatgccctccatgacattagtaggtgttctgggaccatcatgtaagcccaaggtcttatgttcagtttgctcatctataaaacgggagtaaactttcatgaaatagaggtggaaggacaacagataatgcaaataatgtgtttagcacagtgagtagtacactaaataagaagacaaataacagcaaatatgtactaatcatttatgttccaggcatcatgcaaatgcagtgtgtggattaacctcattttctcctctgtgtctctctctaagtcaggtaccatttattatccccacttcatggatgaagaaattggggcttacagaggaaagattttgcctaaagtcacacaagagccaatggcaaggtgacccagaccctgggttgccagttacactgctgacctgtctcctgcccagtgaatgacacctgtccttagttttattactatgctttgttaaggaaacactcctcactgtatccacagcactttaaatttggatgggtctcaacccttttcagtcatgtgacccttaacaaaatcaaaactaaatcacatttgagaagcctaaaatgtaaaacaaagtaaaaccagaattgctgtgattgaaccagttacagagccctagagccccccttcctgtgacaactgcataaaaacctttgccctctgtggagcacagtaggaaaatattggtctgaagcatagttgagtggatttgctgcctggcacatctaggcttactgtctccggggaccatagcctgctggttccctacaggatctgaatgcatgtttaagctcagataaagagacccaggaggatcatgagggttgggacaggattgaatagagcagtcatctttctgagcttttttaggtaagacccaggcaatagcctaggctatggtggggttcctggagagtctgtaagaaagatttccaagaaaactcattcttatgaagccaggatttctaaagatagtgctggctcaatggcaatgaggaatgacctcctcttccctcctctccccccaactccaattaagtcattttctttctctccacctgtacctggggttctctccagactgcaggcaaatggtgcattaatcacacagatcagccagtgcacaaggatggtgggaagtggctgatttatgaaccagcccaaagtgtggggaggctgggagtgggtgaggtgggcccagctcggggagcatatgggggctccttctctaggaccagacccatatgctccgctgcaggtccatatgctgtgtgggctggtcccccctttgccaatgtcgaggctgcctgtctgctgtaacgtgcagggagctagatctgccacatgccctgctggcattcaaacacaccctttccaactgtgtgagacatgggggctcttcttatagacaagaagagagctacacttatgcccttgtcaatatgagttattgtcatcaatcttttagaaacagtccacaagaaatgagcaagaccagtttttttttctatttgttagaaaagggaattgagacataatgctagaatcaccaacactatgactggcaataataataaccaacaactattgcatgtacatcaggtcctgagctccattctgatcagtttttacacatattaattaaagacacagagtggttgcccaaggtcatggtttgagcgttagagttacgagttgtattcagatctatgtttgctgccacttcctttaaattgtcattcataatttagtctttccctcactcaatgagcatttatggagcctctaccaccgttagaccctataaaaagggcttaggataccactaagaataaagcagatatgatgccatctctcttgggagacacattttagtggagcaagacagacaacagcaaacatttttaaaaaagttaaacaagaaaatgtgtagttacaaattgcactaacttaaatgaaggaagtaaacaaagggcttggacaagaatggcagggtacctagaacagccagggcagtcagaaaagcatgaagccttcagggtgagagggagctgctggaggggaaaggagctccaggctaagaggttaatgtgtgcaaaggcccggaggagtgaaggagccccagtgctctagggacaagtgcaggagggacagaactaacaagggacagcagagagtggtaaaagatgggatggaaggggaggtttcaggcagatcatgaagggattatatatgcactgggaagttgcttcagagttttcagtagctttgcagtactcacttatagttaatattggtgagtaacagcttagcttgctcattaataatgtgacatcccccagctccctagccgatcccctagggcctttcccatccccagatattttgtagtggcagaagccaactcaagaaacagttatttggataaagatgtgtgctcaactggtctgtatatacctccaagggcaggtattatacttaatgcctagcaatatatgggaaaatatagtagaattcacaggatgtgggtacatttttcaatttaaaaactattactgaatctttaagaccatgtttgctttttagtaagctctaaaataatatcattactctaccccattaagttttactacactaggttagcattctatttttttcctttgtacattttttttctttgaagatatcaatagctttggaatgttttattgttttatcatttctatctttttttaactttccgtcgcagcaagcctgacctcagggaaaagatctattagactgccaagattaaattttatttaaccaacatgtatatagagatcattctgtgttccttatgatctaaatgccttacaggaataaacacatttaaccctataacaagcccataagatcgatactgttattatcacccccattttgcagatgaagaagctgaagcacaaagagattaagtaaaacagcccaagttcctattgccaggaagtggtagagctgggtttgagccctggaagtctgtcccctgtgtctctgctattagtcatttccatccgatggaaatttccttgtgtagaaactgtgcttacaggccataatttttaaccctattgtgcttcgtatgtttcccttgcccactaaagaggattctgacttgacatgtggatcttccctcatcctctgagctctcaggagcctcctgtcaagcagggcagggtttggggtttgttacttagtgtcaggagaaaagggcaaaaggaaaaggtagagtgtggggaggagattgtcagggattgaggagattgcttagagagacagactgcagctgccatgtgtgaggtctgaggatctgtgagactcaaagggaaattttaagaagcattgcggagaagagaaacttcttttgctgacaagtgtgagaagtaaaggcaaaaaggctttcacagttctgaacactgttttattgttatcctgcattctgcaatggatatcactccatgctgagcctggtgagccacatgttacaacagcaaggcagctaaaaacaatgcaattttattttcattttctttctgccctctttctttctctttttctctagctttcccttcctcctttcctctttctctttccctccctccatcctttttcccttccttcctttcaggatccatttttggagcacccattctgtgccagatcttgttcacaccctctgaccttcagaagctcagtcttaatatcatcgaggaaaacatttagactacatacacgtctccggtaatgtgaggacatttgatctcctgcagtcccctggagagctgctactcttttacttggtctatgagcaaagcttgcactttgtcatgcctacgatttgagaatgtgaattcttccacatggcatctctcctataggttctcattcactccttctgaaggcttgggtaaaagacaaattgagaaactgtttcacagtttgcagacttcttaaatatttgtctgtgagtgctgttggacttagtataacaggatttagcaaactcttttctgtaaagaaccagctattaaatattttaggctttgtaggtcattcagtctctgtcacaatatctccactttgctgttgtagtgtgaaagtagctttatacaatatgtaaacaaatgtgcatgactgctttctgaaaaacttcatttacagaagctggcagcaggtggatttggtctgtgggctatagactgctgatccctgtagagaaatttggattcttccgtgcatagacactatcccttgtggatgttctgatccaaccagaggatccctaagtgactgccgggcttgtgcaatgaggtggtggtgtctttaagcttcccaccggcaggccttttcaggtgtttatggtcaggtgataggagacgttgctccaatcagaactggaacacagttgccctaatcttcatgggcatccagtttatgaagggagccaaggaaagtgtgatatttaaaaagggattttggggacgatgctgggtgtgaacacacacctatgtacaaacaatttttcaacatgtttgatgttttgtgtgtcatgagtgggtaaatctatggtgatggtggtgttggctgatccattttcacttgtttacttgatggggacagagaaggagaggtgaaaatgggggcatcccagggaccagagccaaataagatggatgggtggttattcaagatgcaggaaggtgactgctacatctctcctgggaacatagaaaccttactaagagaaatgcatcctgcaaggatagccacaaagggatagcctgtgctgaatctagatgcttttatttaatgcctatgaatgcttttagatggaacatgtatttctagatctccaaattctctccattctcttatgattcatccctgtggtgtttgagtttgcactctgtgaagaccttctttgccacttcctgcacactctttctccagtgtgctttcccttcaaacagccacacctgcaggtgtttcccaaaggaacgcctttgatctatggaaccctatgcccacattgagatgagtgagaagtgccttggaattcacaccctccagggtggcccttaaccaatgactaaggggatgtaggagtttaaaagcttccttgtgtggggtgtggatgatgatgacaactactggggtaacttaccctccagagttccctgtgggtcaggctgctggacttggcatgataatgtactcctgtctgactttgctcacaacccctcttttctttcctccttccctcttccctgcccagtttctcctgggagcatgtccttcataaatcacttgtgcacaaatcctcatttcaggggacagtaatttgaatagtgaggtgcgtgcaagtagtttatctatgcctcctgggtaaggtattcggtgcctagcaccatattggaaactcagtaggatttgtaagatctggctacatctttaaattctaaatccactactgagtctttaagaccatgtttgccttttatagtaagctctaaaatgatttcattactccaccccattaagttttgagacctgtcccaagactcattccctgaagaaaaatataaagagctgctaaggagaggtagaagccaggcagatacttgggccaaaaaatgaaatggttcattgattacaggaaaggaaagaggaaaacaacttaatttagattgaaactcctctcccatttttttctccatgtattagagttaatgaatttgtgaaataagaaagagtggatgaggggaatgctattcaaatgcctgcaaattaatcttcctggattcttcctgcttcagcctccctatcttctccttcaggctgagagctcagaggtggtgggcacatggtgccacccacaagttatcatttgctagctagtatcacaaactagtaaatgttgtatcaccctccctttttctcttttgggtattttttttctgttctcctcactatgaaacatcatattcaggagaagaaagagagagtttatagagtttaatactgattcaaaaagtcactgaaaatcccatttagttatagagagtgatataaaaatatagataaatatgtatttatatttttaaaatggtattttattgatatgtagcatgtgtttcactgggccaatgatattatatttatttatacttttatatatttaaggtgcacaatgtgatgttttgatatatatatatatacacatatggtaaaatgattgctagagtcaagcaaactgacatatccatgtatccatcacctcacatagctaagttctggtgtgtataggaagagtacctaaaatctaccctcttagctaattttcagtatacagtatgatattattaacaaaatctgcatgctatatgttacatctgtagacttaatcattctacatcactgcaaatttggactctttgactcatatctccccattttctcctcctccctgcccctggtaaccgtcattctagtctctgtttctatgtattctcaatttctatgtattcaactttttttagattccacataagtgagatcatgcagtctttctgtgcccggcctgtatcactcagcctatttctctccaggctcatttgtgtggtttgcaagtggcagtatctccctttttataagccaaataaaattttattatatatatgaagattatacacacatacacacattttctttgttgattcaaacacaggttaatttgtttattgggttgtttccacatcttagctattgtgaataatgctgcaataaacataggaacaaagatatctacaaggtgccaatttcgtttcctttgggtatatgcccattggaaggattgctggtcatacggtagtacaagttttaattttttgaggaacctccatactgttttccataatgactgtactaatttacattcccaccagcagtttgaaaagatcctcttctctctacatccttgctaacacttgttttctcttatcttcttgataagaagccatcctagcaggtggcttctcattgtggctttgacttgcatttccctgatgattagtgatgctgagtacattttcatacatctattggccattttcatgtgtgtgtttttttttttttttggaaagtgcctgttcagatcctttgctcatttttaaataaggttatttgttttttgcttttgagctgtgtgacagtggagtcaatgatacttgtgtgtataaaaaggttctgtaatgctgacctggcttatacaatttaaagagaatttctagaatcacattttgatgaattctttattccccaatagtcctaatcttaaaaaagttgccatgaaaggggtagcaatactcagtgtggcacaggagctggcttataccagctcacaagagcctattgttaacttttcaggaattacgcaaactcgtcagtgttacattggtggcttgaaaatggctgtgttggaaatatttacaccatgaacattgacaaaagctttaaatcatgccacacctttcccactccttcccaggagatctgactgtcaaatgtttaccagaacaccactggtagtgcctggacctttcctctgcccacatgtggtgacctttcctctgccatgcctgtggactggctgggttaacagtggggtgtctaggtaagcgtctggatcaggattgttgcaaagggctccttgctttctctccattgtgatctgcataacattcatgaaagtctttcctcctgccagcaggtctgttcttgcattagaaaaggttgtgttcagttatctttctgcacttggaaatacatattttgtgagataaatgaagaaatatttgcagctggtatacttttcctcccaggatatttgaatattttgaagctatggtctcattttgctgagaagagaaagaaagtcagcctgattcctggcttgtatatgagtgctagaactcatgatcatgatggacagacttaaacatgttctttctgccagagcatgaacctcattctatgatgagaataataggggtggttttgaattaggctgttatgagtgagcctatgaatatatgtgaatgcagctaagtagctttaatattcattcattcaacagacatcagcttcatagtgtagattcacagcccagcagggaagagctaggatgtatatgcctattgtctgaatggtacatggcgtgatagaatggagttgaggttttaagtcaagcagacctgtgtgtgaatcttagctctgtaattctctagctgtgtgaacttaaccaagccatttaacttcaattttgtcataagtaggatgacaataataatactcacttttccaagaaaaaaaaaaacaggagcttcctaggcaaagtgggatgaactcatccacaaacaaggaacagcttatacaaaggtgtggaagaatgcaatgtgacaggaatattaaaactggcaactagttaggagacagaatatctgatgttattttttctttaaaaaataaatgacttctggccgggcgcggtggctctcgcctgtaatcccagccctttgggaggccgaggtgggcggatcacgaggccaggagatcgagaccatcctggctaacatggtgaaacccagtttctactaaaaatacaaaaaattggcctgtcgtggtggcggatgcctgtagtcccagctactcgggaggctgaggcaggagaatggcttgaacctgggaggcagagcttgcagtgagccgagatcgcaccactgcactccagcctgggcaacagagcgagactccgtctaaataaataaataaataaacaaataatttctctgtgcttcctgaatcttaaggccacaggctgagaagagccagattttaatttctctaactgtaaatgcttagactttttcctcacccactcaggcttaagccttttgtgcaaagggaaggtggcatccaccattctctcaaagtttgctccacatccactcctttaaggtataggcataagaatgagtaaatgccaagagaacactggatccttccttctcttgggcaaatggtaatgctcccagaggcagaaatgggccttgctttgcattccagacttgccctctgtgaacaggctttgcataaagtgaatgcaatgatagaagattacagacctgcagccagaggtagaagatcaggaggggactggattattggagagctgttctcaagttcagggactggggtccagaatctccagtggctggagggataggcctctgtgtttattcaaaagctccctgggagattcagacacatcctttcactccccacctctctaggtcccttttcttgttcactgaacgcactgatgtggagtgtactgcagggaaaccttgtgctgtagtatttgggaatgctgtcttgaaggggcaaacctggggttcttctttagactttttattcactattctaaacgtgatccgttctcccaaatgtaatattttcccccgagaataaaaacactgaagaagtacgcaaaataaatgtgtccctcccctgaaaattgcctcattgttgagttctttttccttttacaaattctgtatttgctgagcaacagaattacaatgacaataacaaaacccccaaataaagctgtttccatttttcatatttaccgcaggccttgtccatatgtagacataatttttccagtgttactcatagtgtcatataattttatattttgcttgattcacttaacattatattataaacaaatgttgagtttctttgtcgtattcctaacagacattttgactggctgcatactattccatcaagtggatgtaattttatttacttaaccatttctctattattaggtatttatggtatttacaattgtttttaataatacattaaactatcacagaaataaacatcttctgtaatcccagcactttgggaggctgaggtgggcagatcttgaggtcaggagttcaagaccagcctggcctacatggtgaaaccccatctatactaaaaatacaaaaattagctgggcgtggtggcacgtgcctgtaatcccagctactcaggaggctgaggcaggagaattgcttgaacccgggagatagagattgcagtgagctgagatctcaccattgcactccagcctgggtaacaagagcaaaacttcgtctagaaaagaaaaaaaaaaagaaaataaataaacatcttcaacatggcacttttataattttttgtcttgttttaaaatgattatattgagtacaattttcataggtggcaaaatgacctaaaaacatttccaggtacaagtttacagggcaaccagctttcaaacagagatgtttaccagctttgtcaagatattcatcccttttggatttttgctcatgtcaagagatgttattgctaactgcaattgaactagaaaggagatcacagggcaatggaaaacatgctgggccaggcatttaaacacatatagcaaactctcccctgcagaacagaggtgtggcactcgttatagatatccatttaatggatatgacaatttgaacgtagctttgggaaaatcaagagaagccattagggtccattcctgaggaagcagcccgaatgtctatatttgggaggtctgtgaagctctctagagtgtaacaatcacagcactcctatgttgtccagatagaacacaaaggaggtcacaggaggcaatgcacaatgggaaggcaccccagaactgaaaagggactggcaggcctaagaagggagtttcaggctagcaattggggtagcacctctcctatgggaccaggcaagaacaggtaaaaactgcagccatccctgatcctccagctgtactgactcctttgtacatcaacccttcagtgcagatcagaaaaatgattccctccaaacctggttaggttaggaaggagctgctaatttttttgctggcttgtgatctcagtccttctggtcctgtgagaatttgagtgcaaatggctgaactcttataagtctggggctggttttataattatagctcatcttgtgtgtatcttaccttcctctttctcttgcacctgcttcttcctcattgtctattaatttgcttatgcttctctaaccctgcaagattaaaaaaatgaccttacttctctgtttctttgcctttagcttcaaaaatgtcaacatttagatttttttttctatttgtgttccatgagatactgtgcaaaaatgaacaattaaaatgccttctgacagagttgcctaattagatagtagataaagtgtgcaaattctatttctcatagcagagatctcagatgatctttttctttcctctcttctctcccatgtcagaagggtttaatatattgttttctctcttctctttctgaccctatagtggctttcttccaagcagaatagcaccacatgagtgccttgttacagtggacaggaacatgcattatttacaaactctatgctgctcccacaagcagcagttctcaaaagaatttacatttatttcaaactattttgtgaatcaatagaacatatttccttctgatcttttagcaaatttagctgaatgaaacattttaaaaatagagtggtttccaccagggcctgtcggggagtggggggctaggggagggatagcattaggagaaatacctaatgtagatgacgggttgatgggtgcagcaaaccaccaaggcaggtgtatacctatgtgacaaacctgctcattctgcacatgtatcccagaacttaaagtataataaaaaaattaaaaaaaaattagagtggtttcttcacacctatgcataaagataggaattttttcagaaaaatttcagctttgtcattatttaaaatttgtttcaagttgccatttcacttttgaaaatatttacattttgaaaaattgcaaaaatggtagagtttctgtatacccttcactcagctactcttcatgttgatatcttgagtaaccatagtacaataaatcaaaaccggaaaaataacttggtacaatactataatactgtcttctatggtttggtttgtccctgtcaaagcttaaaaattgaccaaaattgaaagttgatgcccaatatggcagcattggagggtggggcctaatgagaggtatttgggtcatgagggtagatccctcaaggatagattaatggcctacaacctgggtgaatgagttctcactcttgcagaagtgagttagttcctgagagtgcaggttgtaaaaacagcctggcttcctcagttttgctctcttgcttcctctctcactgtgtggcctctgcacacatccactctccttctgctttccaccttgagtggaagcagcttgaggcacctgcccagatgcagctgttcaatcctggacttttcacccacaagaatcaagtgttgaataaacctcttctctttataaatgacccagtcttaggtattctgttatagcaaaacaagacagattaagacactgttcctatagtacaataattgtattgtattgtaaagtaactaaactacagaccttatttgaatttcagcagtttttctacttatgttctttatctattccaggatcccatccaggaccccacattgcttttacttgttgtgtccctttggtcttctctgatctttaatgatttcttagtctttccttgtcttcatgacctgacacttttgaaacgtattggttggttattttgtagaatgcccttcagcttgggtttatctgattttcccccttcctgattagattgaggttaggcattttcggcatgcataccacagaagttctggccctttttgtatcaggaggtgcataacgttaacatagcctatcactggtgatgttgactttggaccacttggtgaagatgatgaccaactactatgtttctacaatagtatttttatctgtttaattaataaacatcttggggagaagggaagaaccctgtttaatttcgtttttattaatattaaattctttcctttgcctgtttttccttttcttttcttcttttttttttttttttgagatggagtctcactctgtctcccaggctgaaatgcagtggcacgatctccactcactgcaagctccgccttccgggttcatgccattctcctgcctcagcctcccgagtagctgggactacaggcgtgtgccaccatgcctggctaattttttgtatttttagtagagacagggtttcaccgtgttagccaggatggtcttgatctcttgacttcatgatctgcctgcctcggcctctcaaagtgctgggattacaggcgtgagccaccgcgcccggccatcctttgcctgtttttcttatcttctgaatcttattgatgtccatttgatggtttgaaaatttaagagataggagcatatttagttactatttggaaagttttcatggatgaggacacagtccataggggatatgtgaaaattgggggtaaggacacccaaaggcaccccttgggagcattctggaagaagtcttggaatgaggaagccaaactttgtttctacagaaattcttaacctctctaagcatcaatttccttgagtgtaaaatagggataataatgtccctgcagaggtatggtaaagattaacatcaagtactccctggatgtttcctggtacaatacctggtgcaaagtcagtctcattacatagtaattcccctgactccagggagtcatgtgctcaaataccaacccctactctctaattctgttgtgcatgggaattctttgcttctgtaggcctcttgccagttcatagacctaaactgtgaactacacagagaggaaattgtagtctgcctcctgcagcatgcagccctgactcaaacttgttttaaattcacattggtgaaaaatgggcttgcatcccactgtgaatttaaatacttacaacccaggaagaaacggatcgcatggctcatttatcttgcagccattaattaatggtggttaattgtagttatgagctgttgaattccaggctcttgcacccacacattttctttaatgtgttcagaaaaccatggaggcagtgagttggggactgaaagaaagactgtcccagagaggataggctcacaaccccacccctgctcacttgtttgttaagagagggcctactgctgcaccaaccttctaggcagggggctgtgatcccacaacacactgctttctgggccacttccccacatatttattgtcccctaagttcctgggagggatcttcttagacaaaccctctttgtatttcttctgcaaatgagaagtaaattaacttgcaacaaagaggaaagaactttaataaatctggcagcttgaaagagattgtgatatgaagaatcaggacttgggcaagaatgaaaattatgtttttgaatatttctgttgtactctctggggagaagactgctaaggggtgggacataacctgggacaagatgaatatggatgtttcagaagagaagagcccttgtgaccaccttttagacttcatcagatgaaacttctgtagacatctctgacctcacagctcaggagttatcactggatttatgaatgcgataggcacaattctaagatggttcccatgattcctatcttttggggtgtaggccctgtacaattctctccccttgagtgtggtgggcctcatcaagttaagtgaaccctttttaaaaagggtctagagctccaagacaaaatcatagagatttgaaactacagcaaatgctccccttgttggccttggagaaagaagtgaccaaattgtggagacagagatgtgaccagaacttgcaggtgtcccctaggagctgaaatggtctccagctgggtgctggcaagaagacacctcagtcctacaaccataatgaagtgaattcttccaatgacctgagggagcttggaagtccagctgtacctccagatgaggatgcagcatgctggcaccttgacctccagccttgtgagcctctgagcagaggactcaaccaaaatgtgccaagctattcatgaaaattataaaatgataaatttgtgttattctaagctactaagtttgcagtaatttgttatattgcaataaataacaaatacatggaatttatttcctcatctcacctgggctattatcagtctttatttttttccatttgtgtctttcctccttcacagcacagagcttgtgaagatagatttgtcttcttaaagaccttgaattatattatctcatgctttaaaattgtcagtggcttcacaatgtctacagcaaaaagcaagtcctggttaatctgaatttcatggttcctaagtgcctttgagcctaatttcacactgggtcagttctctcatcctacattccagcctaaagaaactgctcatggccaccttccacaatttctgctcacactgtgcctttgcctatgctaatttctctgctgagtgctttgattcccaaggccatgtactcaactccctattcttcaagtcctagctcccccttggctactgtcacgtatcactcgccctttgaacctcccagcaccacattatacccccagtagttcggactaatatcttcatagtttgtgatctttttgttatgcagaaaattctgtgaataaatgagggtttaactaaccaggctctgtcctcaagatgatcacagttagttcctttttccttttcttttctttcttttttttttttttttttatttgagacagatctctttctgtcacccaggctggagtgcagtggcaggatcttggctcactgcaactctgcctcctgggttcaagcaattctcctgcctcagcctcctgagtagctggaattataggtatgcgccaccacgcctggctagtttttttatttttagtagagacaaggtttcaccatgttagccagactggtctcaaactcctgatctcagatgataggtctttaagaggctcagattatgcattcctccaacatgtaaaagctcatttttgcctcaaggactttgcagcttcgattccctctgcctggaatgtctttacctaagattctcacatggttggtgccttcttatcacttagcacctaaaaatattgttctcctaggaggccttctctgggcactctatggaaggcagcctatccttcccatcacctatccaattgctctgctttattaacttcaaagcagttattgctatttgaaattatctcacttactgatatgtggtttgttcatttcctgttttctcttgatggtcagcaactttcttatcttgctctctgttttatctacagtatctggattattgtagtctctcattcaaaaattgttgaatgaatgaattcaaaaacatgtcacataacaaatattctgtgtcctctcagtttttttctgcttaagttcaatttgtaattcttcatccttaatccatcatagtgagttctcacccacagaagacacatattttgggagattatgtaacatttaataatttaataagacattcataatgtaattattatctttgtggaatgtctcctacagtttgcatccatgtgcacattgtagtggatactgtcatatgctgcctagcttgctccttcacagatgaaacattcagattcctagctgctgaagattcgttgctgatgcctcatagatgattccttcttagggaatttcctttggccaaaggtagttgccttgctctaggaagggacatttacatccaataacttgtcaatgtggaggtacaaagatcttgcctaaataggaaacaattctaaaagtccatcccagctccagaggtccctgtgaaaagtcagctgaggactttactgtaactgtaccatgatctaatccaccttttccttctgcccaattctgcttcttacattctccaaacaatgttgttcctaagggcacttcctaatctgcatgcaaatcctcatctcaaagtcgatttcccagttaacccaacctaagacagttggggccagaaatggctaaggaagaagactctgaaatgggattttggagctggattacccactagccaaccatcaacatcagtgaggtaggggaagtaccgactatccctagaaagaaatagtggtgcgagagttaaaatgtgccagtgaagaactgtgatgtgatactggtagacgataaaacactggtgaatgcaacacctccggattttaagacattcaagggatgcaataatttataaggacaatggaataggatgactgttgctgcggcaatcagtgcattaaaaagagactttaaatgcctgagtgtgactagtcgccaatataacatgaagtgcaaaagtcagagggcctccttggcacacatgaaataaacctctcagctcctacagcttgtaggcagaaaaggctgaaaatcaggtccagaatattagggttgtagatcttcaaagaaggctaaattctcaaccctagcatatttaccatgccaagttaggaccctggtttgttttaatttttggtgttgatgtttgtttttaacaacatcattgggatcttgagacttgaaataagaacaactgagttgacacacttgaaaacctaaaaactccagacctactggaacccactggcctcacagaagtgctctacttctccttcttgaaatctagtgcttccctatgcttgaagatgattcagaggcctttttgtcttgcaagataacatacaccacctacagaatctacccccaccactttttcttgctatcacatgagtaactatgttcaaattacaactgaacagggaaattctgatcctgctaagggagggaatgtcaaaagggctacaggacccaaccaatgcttatcagcaggatcttagaagacatgcatgggactggatcctaagggtgctgcctcaagtaagggaaacataaagttgaatatgggagattttattgagatagagcacatgcctatgatacaggatttaacaccttaccaaggaccccaggagagggtcctaacacactgctgggatggttcttggaaacatggaaaaagccatggccattctaagtaaaccagagatgctagagctgccatgacaagtattcgaagaagaaagcaaaagatcatgctagagggagtatactaaataaggctggaaaactcatcagctaatcctgttccacgggaggatccaaaggacactccagttaccaaatcaataatgtatatgctggtgacaggagcaccagtgttgttgagaagaaacagaggtgggtgcaatgatcacaaagagtggcaaagttagagtggcagctggaggagcctggtttgcagagagttaggggatggttcatagaacaaggtgaccctaggggaaagattgatgggcagctaacaactctaatactcaacgtataaatcaagagatgtcaagaatagatggccaagaggctgagggcaacaattccaattaaaagttatgatcacttacctagtttctggaaatgaaccagttttagatgctaaacccactgatggaagccagtcctcagttggaagttctctgcaaccctatagcaagtatcagtagtgaagatgcctccagtgccttctcaaagggatctatgggtacttacatagattactgtgctctgggaagcaggggaacagagacatttgaaaggtactaggacacgggtggggcgcagtggctcacgcctgtaatcccagcactttgggaggctgaagaaggtgcatcacgaggtcaggagattgagaccatcctggctaacacagtgaaaccccgtctctactaaaaatacaaaaaatcagccaggcgtggtggcgggtgcctgtagccccagctactagggaggctgaggcaggagtatggcgtgaacccgggaggcagagcttgcagtgagccgtgatcgcgccactgcactacagactgggcgacagagcaagactctgctaaaagaaataaataaataaataaaaataaaaaaagatacttggacacagggtatgagttgacattgataccagagattcaaggcattattatggctctctgcctgtcacaagtagggcatatgagaatcaggtaataaataaagacctggccaacgtttatctcacagtgggtccatagtgaccatatacctatccagaggtcattcctgagattcctgcatatgtagctgagatggacatacttggtaagtggtggaactctgcattggtttctgggaagccacttaaacttccctcagccccttgatgaatataatacataaaggaacatattacattgtggcaggaatgacctatattaatgtcacccttttcttggtatccccaagcctctgaatcactcaaaggcttctcctaggctgtagccaggccaggggcacgagctctcatgcaatgcagactatgggccaggaaagcagcctgggacagtcaggtttctgggctttgcattgaatgaatcatattttccagtctttcaaggaatggtgcttgcaatgggaaccaacgtttctctcaactgactcttccactgacttcaagaatgcttgtcctgaatggggtgtgggaactgacccacaaaatccacctattttttttttttttccagatgagaagttgcattaggaatagggaagtgactttgaccagccagactccatctataaggacttgcagagtcaggcaggaattgacttcctctactatctcactctttccttgagtcatcactttccccccttcttttacttacacaaagctaaataggcacagtgactttactttaaacaagtcattcacccattattagacaatttttgtttgttttaattgttggtgttgatgtttgtttctaatccctttgaaacaaaagttcgcttctgtgagctcttatttcctccctggaaccctcattattttgttttctgttgtaaaacaaactaaggacttttaatctagacttcacagatgtttggtattgtcctgggtattttacatattcattttcatttacttctccccctagagttatgagtcagaaattacagccattttacaatgaaagacactgaagctcagagatggtaaggactttatatggagtcacacagcactctatagtggtgcagaactcaaagccacatctacctcatttcaggccttatccactgcctaccaccagccctgcttatcccatactcttctgtagattgaagagtccaacgacagagattacaccttacatatcttggaggtcctgctcactctacccctgccttgctgccaatagagagtctcatatatccaataaaagcttgttgaatggatgcctgcgtgaatgagttatgcaataaatccatgagtgtgtggtaacaaacttcaaagaagctgcacgattgaagtgagatatatctcacttgagcaaagagctcaagaaaaccaatctgaacaggttgggtcacagaaggcatcaaagctaaaatcaccagcagcaggagaatagaaaaagaaagctactgaaaaggaaacaaactgacaagaagttgaggggcagcttcttgaggggatagactgctatgctgcattcctaaggaatgctgagcattggccagtgaagagcaggcacatttccaggctgatgggaccacacaggcaaaggctaggagagagagggcagaagacaggaaacagatcgagaagcgtttagtgtggccagtgtgaagaatgctcagtggagagagaaaagaccaggctacggggcatggaaggttcagattttaccccaagggcaatggagcattattgaaggattttcaatgtggaaagcacctgagaatatatattttagttagatcatttaacttccatatgagtaagagattagattggggtaatattggagcatatgaccctggcctcaagaactagttgttctatactcagaccataatagacttgggtatttgcccacaggaagtgaaggtgaagtaggaggtgggacttgacgccagcagcagggctcagacagggaccaaattaaggactagctaaaacagggatggggcagaagtcactttccaaaagacacacccatcagcgtgccatgtcagtttaccattgccatggcaacacccaggagttcccgcccctttccatggcaatgacccaaggacccaaaagttatcacacatttcctagaaatttctgcataaattgcccgttaaactacacgtaactaaaagtaggtataacccccattttgggactcacctgccctgcatcaagggtacatgcacaaaaaatttcgcagagataattttaatagtgatagccccaaactgcaacatccatcctcagtagaatgaattcagttattgtccagatattgaaatgctatatagcaatgagaaagagggaactattgctacattcagttattgtccagatattgaaatgctatatagcaatgagaaagagggaactattgctacataccaccacatagctagatctccagacatgttgaaaacagcaaaccaccccaaaagagcatgcgattctgcttatgtgtaactcagaaagaggcaaaactaatccatggagattaatcagactacctgttgcctttaaggtggatattgaccgggaaaagacatgatgaaggtttttgggatctggtcatattcatagtctgatctctgtagtagttacatgggtgtaaaaatatgtaaaactttattaagatgtacattgaagatgtgtgtgctttattactgtatttgtgtaagtataaaatacttatccctttggaatttcctctataattactcttggatactatggcattgtagaaaacagtgaactatatcagtaaccaaaaaccatatagaattttcctgagtttgtgcttagtctatgtgtggtggtgctcagattaaaagcaaatttagcatttagtgggaactgaatcagaacgctaaatatatctgccagcttttgctatttcctcagaaaagctcactgtaatttgtgtgtgtgtgtgtgtgtgtgtgtgtgtatactacagctacatgtatggaacatcccctctgagttcttctcaaagttcctcagagggcaggacctttttgcagctgggcgtgcggtagataatagcccagtgcctgagtttctaagtgctgtgagggatgtcagagtctcaaccgagaattatttccttggtgtctcaccctgccctgcctggctcttcccactcagttcctggagggcttttttcagctcagtctgaaagagcacccagctccccagaggaggggcagcatcttgctgtgatgtgagtctaattgtttctagattgagcgtttccgtgggacaacagtcccagccggtgttccctgaattaacatgctcactgaaggattgaagatggtgattaggcccgacagcatcagtttcggtgggacagtcgcagtgccacagagctgcatgggaccgcaaggagatttatttgtgtggaatggagacatatggccggaatcatctgctccctttcctctgtaattaaaacatctgggagcagcaaagggctggaaaatgaggagaaagcagtgaacatctcttcctgctcagctttgaataatccagccatggggctggggcatcagggggtacaagccacctggtataggctggtccaggagttgcaatggcccaaaggccaggtaacttgtaaatgtgacttgggggttttgtttttggtgctttattttattttttcctgaaagcatgtagaattggtttctttctgaagctgtttctaaaatgttttacaaaaaaaaaaaaaaaggctaaatgacaacgaaagtgtagggctcattgttggagcctgatacaggctatgaccttcatctaagagctatacctccaatggatccaatcaagccagtatcaagacccttagcaaagacatcaagcttggaaggaatggtgcctaagggtgtcctttacttttcttagaaggactgggagtgacaatttagagagaaccttcttaggaagagtattgacactatagaccaattctttctctgttggttcactcattaacttacccaccttcccatctatcagcccacttattgctccctctacccattcattcaagcaatgagatttcactgaggttctgcacttggttctgggaaaacagtagtaagaaccctcatatagttcaccttgctttgaatgggacatttataaacgcacaaaaataatcccacatgacccctgctatgtagccaggtatttcatgtcttgtgagcatgcaagggagaagaccggctcctgcctgctccattctgctccttgaatccaataacatctgttgctcaagtctctgttccacacatcacataagagcccagtgccatcagtggaaaagtaaagaggcccgcatttattgagcacttactatgtgcctagcactttacatacttgaactctttgaagtgggcattattctgtccattacacaggtcagctaactgagattctaagtgagaaagggccaagttggcatttgggccttaagggtctaaattgaatgcacatatttttctattttatcgagctgcatgcttccagggcttcactattactgctaataaatactcagccttctgtgaatcctgtgacagttcagtgcctccctgcagtccttcttgcccaggatgttgactcagctatataaacctggtgttgcctcaaatccttttctaagaatccggattcctgcactctacccagcttatgctagccgctctacctgctaggtgggattcttttccatctgtctagactcccctagactgggagtaaatcaaagctatgggtcatgtctacttaatgtctttattatcaacattgagcacaggacttgacagacaatttccacacctgcaaaatggatccaattctaggatctgcttccttgacgttcttgtcaggattaaaggagaaagaatgtgtaagacacctgaaatagtacctgacctattttaagagtccagtgaatgttagctagcaccgttatcacagtttacatgcacaacgaccttgtgaagagaacggaggctcaactctatggggaagagaactgaggctaaagagactgagtgacctgtctgacaacacacagctaaaaagtcatagagctggggtctgaactcaggctgtctggctccagagtctgagttcataatgcatccacttctctgagtccttaacaaaaggtcatactgaatggtccacatatccagaatcacaagggtgtcatacacgtgactgagagtcaacggctttgtggattctccccaccatagccccttttcatcagtatatttatttattccacacatgttgtggggtccacccatttcaggaaatagaccagacagacaatgaaaggacagtagtcacagaacacgctctaagtctttatggagtttacagccttgtgcctgcttgaaatgagttctatttgtaccatgcctttgggcagcagcctgtagacaagggacattttctttattcactcccataaagccctggcagtctcctccaaagtaccactcttcaacacagctaaggtcccagcacctggtaagaggtaatctacctgctcatatgacagaggctcctgtttcaggaatcctaggaatagaccaagagagccctgctcgcatagagcaaaaagccgcacaatccatgttgagcctaaatttgtctccaagattcaattaagaccaatccagttcctgattaaagaatctgacatccatccaagcataaatatttatgcctgataggctttctccttaacagcaaaacaatctacagtgacaacattagaaatatgaatacattcctggtgatgactctattatcagcactaataataacttaacagtttcagcatgtggcatgctgagatgtatgcaaatggggggcacctctgtcagaagcacttgggagtggaccggagggtctgtcacatgccttagttgcagctggtgagacctcatttcgagtacaccggtgccttgtactcatttgccggtataacgctctgtgctcatgtatcactcttcactcaaagatcacaaatcagcttggcaggccctgctagtgcctccgtgaagccaaaacatctggataagaagtgaaaaaatccagtctttcagcaagtcagccagccagccatttttcagcacatatttgtttagtgcctactgtcttagtgggtgtttcatctacatgctgtcaaacatccagatgaaagacacattccttttcataattcatctagaaatttgggtaccagaaagatgcaatgcttttataacatctgcaacatctgttatttgtttaaatgttttggttttcttgtgggcactttttcttggaatcaggctaagtatgtgccagaaggttggagatatctggttctgtcctcatgtttctaacctccaggatttctgaaggtatagataacaggataacacctcatttttctgaattatgctccccaaactataaagattaaatataagttgagatttgtggataaatgacactgtgagcatgcatagctcatgacaatacccataaccctcttacttaactagcaggatacaacgacacattgtgtgtcagcaatggaaatgagggaaagatgctatttatatgtcagaattgtcaaagagttcctgacagatatagttcagaggagaatggattaaagaaggaaccacaggtaaggcaggaatttgcttaagaaggacctggaaaagaaactagcagaaaaacagtatcaatgaacagggatgattcgaagggaagaccacagatatttagggaggcacacccaggccccagcaatcccctgggtggtcatgccaaccactatatatttattcttggaaagggggctgggcagagtatgttgccaatcccagagctgacttccaattgtgtaactgtgcctgtcaaagagggtgggcattgtgtaattaactcttggctgctttcaaatggaagaggagaactgttcaccttgatggtgaaataaagaaatttgtctaacttgaacccccatttccacttgtaccaggctactggacttttgaactgacaatgttaaagaaaagtaaatctaaacatgaagaaagagagatacacactgtctttgccaaaatcgatctcaactccaatctggtacttgagatgagcaaagaggaaattctccaagcatataaaaagataaagaatgtcaaaagaagggggcccatttgaatcattagagcagatttcttcatgttaaacagttaaggaagagaaaagttctgaaaagttagtgtgcatccttaacattctagaagctagttttctgaaatgtgtgaggaagcaggaaataatataagacaagtaaaggctagaggtagatgaaaatataagatttctgactttaaaactgcaattgatcattaactagacaattaaatactcagagcattgtctaatataaatttctgcaatggtggcaatgttcctctatattaagggtcagcaaactttttctgtaaagggctcagtagtaaatatgctaggctttgagggccacatacagtcttatttttttaaacaaaccttgaaatatgtaaaaagaaatccttagcccatggacggtacaaaaacagtttgtggatatcacttaccacttatacgcctgctaggttggctataattttttaaaaaaggaaaatagagagttggtgagaatgtggagaaattggaactctcatacactactggtgagaatgtaaaatggcatgtcctttatggaaaatagtttggcagttcctccagaaattaacatagaattaccatgttacccagcaattctacgtgcaataggaatatgtgcaaaagaattgagaacagatgttcaaacaaaagcttgtccatgaatgttcacagtagcactgctcacaatagccaaaaggtgaagcaaacccgagtgttcatcaacaaatgaataaacaaaatgtggtatttctgtgtaatggaatattacacagccatagaaagaaaggaatgaaatagtgattcatcttacaacatggataaacctggaaaatattatgttaagtgaaagaagccacacacaaaacaatggttcgcatttatatgaaatatccagaataggcacatccacagagacagaagcaggtcggtggttgccagaggttggagggagcacagaacagagagtgattgcttaatagatatggagttttctttaaatatggaactagacagtgatgattgtggtacaacactgggaatgtactaaatgtcactgaattatacagcttaaaatagttaaggtggcaaattttatgttttgtgtatttgaccacaattaaaataaacaaagagaaaatataatatttttaaaaggccatgggatgcatttgactaatgtgttgtagtttaacaatgctgttctctatcttcaccatccactagtagccaactcttgctccatgtactgttgatcacttgaaaactgtgaccaagccacgcttggtggctcgtgcctgtaatctcaatactttgggaggcagaggtgggtggatcacttgaagtcaggagttcaagaccaggctggccaacatggcaaaaacctgtctctacaaaaaatacaaaaattagccggtgtggtggcgcatgcttgtaatcccagctacttggtaggctgaggcaggagaatcacttgaacccaggaaccagaggttgcagtgagctgaaattgtgccgttgtactccagcctgggcaacgagagtgaaacaccatcaaaaaaaattaaatttaaatttaaatagccatatgtggctagtgactagtgtattggatagcatgactgcagaaaactgaataactgaaagagagtaagagtttgataaattctcttaaaactcagaggaaagatacattaaaaaaaatagtgatgaagtgaaaaaggacagatccaggaggaatccaaggaggatggaaagagaagacagaagagagacaatgtcaacaaagaaaggaaaaaaccttttacgtatgaagaaataccttggttagttggatggacttaccatgttagcattatcaacacataataaaaagacagctatgctaagacatagcctggtaaaattattctgaattttaaaattaaaatagattttgctatgagcatccaatgcatggaaataaatagattatttagaaagaaacacacaggagaatgatctcatacttttttggggaatccaaatgatttagaaaaatgattatatagttttgttggagaaaatactgagatttaaaagttttttatctagctaagatgggtgtgtctgttcaaaagcagaagaaagacattttctgaaatacagatgctcagaaagtcaacattcactgaaaagaaaaaaaatttatgtaagtgacctgtagagaaagtttaacatcaatttaacataaaacccatgaatgggaaatcatgctgctaaataattggaggaaaatcactaaaactgtaaaacacaaagtttagtataaataattcctgttactatgtttatgatacaatgtacatgtaaagataaataatgtaaaaattattttatattaataatctaaaaatctcagattacttcaaacttggatatggagaagaaaataatgtaaactcagccaggctgtctcaaatgtgtatgttttgatgtagacttatttaggtcacaagaaactgtttttccagtgctatgatatgctcctaatataggcctcttcacaccaacattttatatcagttttatgacggtgttacaggtgaacttatctggagatactagcagaggtggcagctttctccctgaatttggggatgtttattctatcttaccacaagtttctgagagttaccacaacctcatgaaccaaagtgttctgattttatgagacacctcatagaaattatctggctttgattatttctcatgttctctactcatcaggctaattctcaaattatatatgttttcatgtcttcaggggaaagttaaaagcactatgctctattaattgatcttcactttttaataggtggcctcatccaattgatacagaaaacccaagagccacggaaatagaacagagaccaaagcttttttaacccaaaaaatgacaagaagaaattttaaccacagcaggtctgtcattgtgtaagctaacatcttcatccttcaacttccctaacataaaaagaaaaaaatcattaaaaaagagaatagatgtatcaattatcacaataaatgcaaatggtttaaattattttattaaatgaaaaattaaattgagttaaaaataattcaactttgtacggtttctaagagttatatctaaaagttcatggagaaagattaaaactgaaagtattaaaaaacatttcaggcatatgcaaacaaatagaaaacagaggcagggagttaataccacaatttaaagtacaacacagtaaataggacaaagaatggtttaggttgataaaagttatgatttgaaagtatgctataatagtcttgattcataatattttatatgtattattatctagtgatataaagcaaatgctttaaaaataaagaattttaaaaaaattacatgggagacgaaacaaatactttcattctttcatagataatgaagacaaaaatctatatttttatgaaattttgcattacaatttattaggctgaatatatgaatatataacattggattctataacagaagaaatattcctttgcaatgtctacggaatatttactaaaatttaacatagtcttggacataaagaaatcctcaataatttcaaatgggtagaaattaaacaactcatcttcttttgccagagtacaaattctagaagttaaaaagaacaggtttaaataaaaaccacttggaaattgctgcaagatagaaaatatccttcctcaattaattgtatgaataattaaaagctaacatttagaaaataatagactaagtgcatatcaattctcataggatatagtgctaggcaacacaatcatagcattagtattgaataacaaaggatgaaaataaagaatttaacttaagaagttaaagattagtaaaataagcacaagaatagcataagaagagaaatgaaaaaaaaattctgaaaaaccaaatccaagaaacaatataatttttagattgtgcataagcctaattaagaagagtcaaacacgaacttggaaaactacgattgagatttatatcatagggcagccacacattgaattttttttttttttttcttttctgaaaccaagtctcactctgttgcccaggctggagtgctctggcgcgatctcggctcactgcaacctctgcctcctgggttccagcgattctcctgcctcggcctttcgagtagctgggattacaggtgcccactaccacccccagctaatttttgtatttttagtagagatggggtttcgccatgttggccaggctggtcttgaactagtgacctcatgtgatctgcctgcctcggcctcccgaagtgcacattgatgtttaaaagaatgaatacaatttacatttttctgaacagattaaaaaatcttaattaaaaccgtgattaggttctgggcgaggtgctcatgcctgtaatcccagcactttggatggccgaggcaggcagatcacctgaggttgggagttcgagaccagcctggccaacatgttgaaaccccgtttctactaaaaatacaaaaattagccaggcctggtggcacacgtctgtaatccccgctacttggaaggctgacacacgaggatcacttgaacctggaaggcagaggttctagtgagctgagatcatgccactgcactccagcctgcgtgacagagtgagactcggtcttaaaaaaaaaaaacagtgattggggtagggtaggggatatgaataataatattgattgaagaataattaaacagaatggacacatattaggtggcaagataaagaaatgttttcaaagcatttcttctacataagctcttggctcagaatatagtataggtaaggtcacagaaaactcattgcgcagtgtcacattctttttatgtcctgaaatgtgaattttttgagatatgacatttgagctatatattttggatccctactgctaggcttggcatacattaagtcctcagtgaatacttgttgaatgagtgaagtaatcagtggaggcctgctactgataaatattacttcgaaaaatttttggacagctgttgccaatctttgaaccattgtcatttactttcatgtatcttcctcctttctttgttcatgttattcctctgttggtacagccttcctttggaagggtaaattttgcttgtccctcactacttggtttagacatcactttattttagaaaggtcccttttccaaatcttcttccacactaacctcgccaggtatcctttctctatatcccaatagtatcctgcacttgactgtataacacagatactatttgtgcaattagttttcttcctaatgagaccatatggttcttggaggaccatgactatgttatattaatcttccaactcccagcataaacaatgaaatctaggaatttggaaggactcaaaattgtttaacactgcataattgataggtccattttgttataatagccatctcccctctaccatgttttgcaagattctgtgtaacaaaacaagctatgctgattatgaaatagtaattttattcttcattttttatcaactaaaatatacgtaactatcagagtttttgataaggataggaaatcagaaattccaaaggatgtgataaaaatcttgcctgtgcagctttgtagtggggaatgcacaaattttgcaacatttttttctgaaacgttgactcaagggaatatgacttgatagatattaggttggtgcaaacacaattgtggtttttgccattaaaagtaatggcaaaagccacaactacatttgcaccaacctaatagagttgtaggctctagatttagagtttctttttcttttctttgtaatttttgttgcttgtattaggaaacaaaatatgcaaaagtagagaaaatactatacagacaccagcattttgccttttttttttttttcctgcagagttctctttattttcagaaatgaagtcattatggtttgtcttgtctttcacgtcttcccttccctgcctcagtctccagtatggctaggcatgacagtggtactaatcttgtctttggttaaattttgattttttgttcatcctggatctttttgtgccttaatattgatttgtgaaactttagtttctgattgatccatgttttctactcattagctgtttaaccattggattacttatactttaggcagcgttatcacccaaaaaaatctagccaagaaaagcaaactgtgaggtatttccaaggcatggtaatcatgacgttctcttaaagcatcaggcctgaatccatggcctggctgcatatgttaaagtgctgaggtatgttttctgtctgttcccacatctcaagagagaactcccagccacagacagtgcctggatcccttttctaaggaaactttttcctttccttcatcaaagtttcctatacattaagctgcatataccccattgttctggaaaagacaagccaaaaaaaaaaagattatttcttggaagatgctctgaacttctagagaatcagttctttccatttggagctgaccttcaggtctcagcctctgtttcttttcatgtgcctcttttctcctgagttctagagatttcttgggtaacgaccctatataaagaaacacagtaagtgtatttagttgttgctgtgggacagtcactgtggcaggcaattttcatatcttatgttatttactccctgtaaggaggtagtgcttataacttccatttttgggtttggggaaactggatttcacagtggttaagtaatatgttaaatattgcacagggaggaacagaactggaaggccaaagtattttaacattttgctcctttttgcagatacttgagatccattaaagaatctagagagtgaaataacagaactggagctcttgtttagaaagatgattctggtggaatatggaggatggattggtggagacaagggtgttatgattcacacaagagatcatgaccactgaattaagtcagcagcagtaagacagtggataagagatatgtgaaggtggaggatatagattcatgcagcatctttttggagaagctggttgattctttggtcattgccagcaaagtcatttgaataggaaaggccttggaatcacaaagacctgggcacaaatcttcccctcttcaacttccttgctgtaggacctcagacaagttatatattttttttctgaatatcaatttcattctttgtaaaaataaggataataataattttgtttcctcatgacgtggtgaaaattaaacaagatggataatacatgtaaattctttacataattgatctctggtaagctattgctattataattactttattattattagtggaagaattgaaggagggttaggttgatggcaaccacagggagggaaggccagaacttgatgggatacttgatgttttcttctcttaggcaacagttatgggaaatagggaagaagaagttatacagagaatgcagcagagacaggataaactgaaggagaacaagctggtgacctggctggttccactgtctagggcaaggcaatcagcaggtgttctaggcagtctttcctgaccactggtttgaatcctccatactcctgcatttagctttcctcctctccttacttttggagatctgatgcccaagtttcagatttttctttttcctggactcccaatgctgtttttccttctccccacccagtttcttccctcagttctcctgaagtcttcaaggcccatccacctggttttctttgttcaacatttcactggcattcaatccaaagatatttaagaggcatcaactgcgttgcaggcaggaggaaggaattctctgagccccatggagctcactttctctagaaagatatgtcacattctctccactatgctcaacattgcctggtgtctgtttcaaaaactgccagagccactgatttcagaagtaggggatcttcagaggagggaagggaaatgaaaagtagaaacttctattcataggcttaacaagactttgttactgcacactatataccaggcaccctgctaggaagcagaggcctagagatgaaataaagtagctgtaagtttgctgctctcagaaaatcacattctattggaagaaacagacaaatattaataaacagattaataaagtaattacaaactgtggagcatataaaaggctggggcaaagagaataaaaggggtcagggtttgcaatctgctctccttacactgggtggtagctgtgagagtttggccaaatgcaaatatttgctttccaggtcttcataccaaagaataggtgggaaacactagaccaatggactttagtattttttaatacaccttttatttttgaattactttattttatttattattttcttttagacagagtctcactctgttgcccaggctggagtgcaatgacttgatctcggctcactgcaacctctgcctcccaggttcaagcaatgctcctgcctcagcctcccaagtagctgggattacaggcgcatgccaccatgcttggctaatgttttggatttttagtagatacggggtttcaccatgttggccagactgggctcgaacacctgacctcaggtgatctacccacctcagcctcccaaagtgctggaattacaagcatgagccactgtgcccagcctggaataattttagatttacaaaaaagtagcaaagacaaaggacatagagaggtcttgtatatcatttaccccatttctccaaatgttaacgtcttgcataaccatagtactctgctaaaactatgagattcacattggtacgttactagtagttaaactccaggctttgtatttcaccatctttccttgtattgtacattttattgttattgttgttgttccaggacccagttagggatatcacattgcagttagtctggcatctttttgaacctcaagtattcatgcctctctgagcttatttaacacacagatataaaagcagacacaaaagttgaagtattgcttgcataagatagtctgcaaacacgtatgcaaagaggatcaaaaaaatccttgggaaactgggtagccatcactgccccagccattgatgtcagccaagccttttgcatttttcaattcatctctcctgggcatctgggaaagctcctgcatctcaaagatgtctctctcaaaattaagttctttaagcaaaatgggacctggaatgcagcatttataaattacctatgagggcctgtaaacatcagattgttttttttaatttaattgtccttttaaatatttaattcaaagacagggctgggggacggtcatggaggaggtttacaggatgactcaagaaatgtttcctgtctatcaaatggacagcccgcccagaaagattaacccagattcccccaaagaaatctgtgtcaaattgatgctgagttggtctggcatctgaggggaatcttgacatgacaagattaaccctctcagtgcccccgggctctgagagaaagactttcaaaggtttacctgtgcatagctcagcagaaggtcacatagcactgagttctctgcgtgaggagtgtgacacaggaggaagctgggaatgagtgatgaggaggtgttataactcagggggtatttcccacctgattgcactggattgtcactgatgttttatcacactgtatgcttgctgtgaatttgccgtagagaaagctgctactggcttattacagaccttgcagtccacaatggtgggattgtgacacttcacctgctaccagatgaataatctggggtttgggtccttagctcatgaagggacccttatccactgctaagtaacctcttttctccttggacttttgagtcttgattcatgtctttgtaaacattttcactccaaagtgtgacctcctttcctaatttttgcagaaccattaaaccttcttctgttttttaattgttaacctactcccttttctctagactgtatgaattggcttatcttcttagggcttccctagaagcaacatggataccaaccgcttgttactaaacagaggcttagggagaaggacataaggagatgtgagactgagagatacatagagagaggcctatgggtccaggagctcactattttttggttgtcaaacaaaagttctcaaattactccttcttacattgaggccagtattgagggtccaggatctggccatcagaactcacccaagaaaagcagccctgagattgagttctgatggtgcagtgacaaaggtagttcttgttcaggccactcctttgggttttgtttgtttgtttgagtgaaatttacggtttgtgcacaattggaatggtctttaaccacttactcatttgttactctgcataagtgataaaatctctctccaagtttctaccatggaccagatgaagttagttttgacctgaacatcaagcgtgaagaaaagtaagcatctttagctcccatagcaattgtagttggcatctcaagctttcactatgatgtaacgattaaggtgtcacctatgaaaagaaatatccaggattgttcttaagctctacactgggcacccatggaccatatgtgagctctaggtttgttttgtttgaccacacaggtgaacgtgaatcactctgcatgggacaccacagcccccacctctcctattgttttatgcccaatctgcttcatgtatttgcctcacatgtagtgggttggatagtggatcccaaaaagttatgtccaagtcctaatccctggaacctgtgaatgtgactttatttagaaaaaaggtctttgcagatgtaattaagttaaatatctcaaggtaacatcatcctcgttttagggttggtcctaaatccaacgacaggtgtacttataagagaaaggtagagaagtttaagtggagatggagacagagatcagagtgatgctgccacaagttaaggaaggcctgggaccaccagaagcttaaaaaggcaaggaaggattcttctcccctagagaccttagatggagtatagctctaccaagacttcgattttggactcttgacctccagaactgttagagaataaattgttattttaagcaccatgtttatgttaatttgatatggcagccataggaaatgaatacactcctgcagtcataacacatctgtatttgtttaccttttaatctctgtgtgcttgtgtatgtatatttgtgtctctgtgtatatgatatatgtgagtatgtgtttatcaagtgttgaaggccgtttagactcacacaactgctggtcactattctcctatgctcgtgtcttccttctctggccatctttttcttgtggctttctctgaatctttgtggtacctgtagtttttgtgcatctggtaccccttcttctttattctggtgacagaagccaccactctgatgataataattaatttatgctttgagtaattaattagctaaactacaatgattttgaacacctgataaatatgccatgctctgctagggactgtagttatagtggtgaccaaaaccaggcagtcttttatgattttttgacttatcctctgtagtgggcatggtagacacgttgatgcaccattgagattctcccaaggaaacagagaagcatggtgagcagacaacacctggcttaaggtctaactcagctgcacagaacagcctcacctaaggccacatatttcctggggcagcttacctccagcatgagtgaggcagaaggcaaataatattgttctggagctctctgcccaagagaggcttctgggggcctgaatcacaatttgacttctttctcagcccaatcttcctttctgcccgtgccttccacaggtgttaattcctatgccctgataaatatcttgcactccaaccttcatcttagcatctgctttcagagaatccaacctggacactgggtcagagggcaactgaagcaatgcttattcaaagaaatgggacattgtagtgtgataaatgctccaaaggaaagttccctggtttcttgttctcatgtctacacttggagattgtccctctatctcctacctggatggtggcctaaatgtgggactcaattcctttcttttatttacatacacgcctatacatagccacacagacaaagctgctcatatgcaccaaaattcaccgcaacaatgccttgcacagatagaaggtatttctgaagatttggtaaaatggaagagttgtacaatgagaaaaggcaaatggcttaaaatttaaaaatagatattccagttctttaaaaagtcctcttattatttcttccaacaggggcttagtctattatattcacaagttcctttgattttgtggcttcaacactgtacattattatgccaagcaaaatctcttcttgcctccatttttacttctcaaccctttaaaattacagccccttttcttacacaggtgtattcatttgaaaaacctcacagaactatacgcttaacatctgtatattgtattgtatgcagttataatactccattaaaaaaacctgtgcctcctcaggcccatagaaataagtggctatgcaacctactattaattatacctttactatccaatggtctagcaaggctttcgagattgatttctctttattgatatctgattacattcttggggaagatggcattcttttccctcatttgactcatggctcatggggtgaggtgggttatttcttctggcaatatttgcttatttcagagcaatttttgctacactgtgagctctttgaggggaggagctatgtgtccttgtttctgtgtcacctacaccttgcatcaagcctgaaccaaagaacagtctcagtggacactgaacgcaaaaactaatcaattgataaatagaggaaggaatgagtcctaaaaaaatgtgtaggccatgggaccatgaatggagacatagccaggaatttgtatagctgtggcttgggtcttgagtaccattagggtccagatgatttgggttggaacatgagccacactagaaacactcagagtttgacccatatcacgcggccttctaatggtgatccctgttgctccctatagtcaaaagattcaccttcatattcagaactcttcttcatcaacttcatagtctctatgcaggttattaacattcataaaccattcagacaattgctcattcattccttaataaacttttttaaagctaaacatactaagaacttttatgaccttgtgtctttattcacattgtgctctttatgcaaaattcccctttcctatgtatttcctacaaatggttgttgcaaagcacatgggtgttgaagtcctgaagatctaggttcaaattctaagttggccactcatgagctgggtgaccttgagcaaatcaccttaacctttctgaaactcaaattcctcatctatagaaggcatagtagtggtatgaatgataattatttcacatggttgttatgaggatgagatcaggcaacagatttaaacatatttgagaccctggcaccagaattctacaagttcagggttctgagagtgaatatcttcataaatcttgcatcctagtcacctgtcttacctcagtctagactgggacctgcctggaacataatagttgctgatttcttcccccctctctctcttttttctgtttcctccagcataaataattattacaaattatattgttattagtctagaccagggattaaaaactgtggcccaagggtcaaatccagcctggttatgtaaataaagttttactggaacacagttatgcccatttatatgtgttaaaacttattgctttgtgtcatatacttattatggtttcctggcttatgcgcctaatggtgactacagatgttcttttcattttgttatggaatgtttcaagcaactatacttttgcttaagttgaacccacggtgggaaacatttatgctcctttcatatcagcaagagcagcctcctttcccttttctcttttaaattcaaatttatcaaccacctaaatctagtcaccagatttgtcatagagaggcttcctataggtttgggacctttgctcaaatcagtacttttaagccattattagattgtgataaaaagggagataacacagggcctgatgcactgacaatgagcagagcagcagaaatgtgagatgccttctggttggcttcctgctgcttacttggcccgcttgcctcaagggaatcattctcaaactttctgtttcaccatgtgatagaaatctcattacatctcaagagcctattttgaaacttaaatcataagggagaattttaatgagctgagctttgcttaagctgcagagttgagtttggcaatatgttggttgagattgtcatggggagttatctttctggtttcaacaatcagaaaattattgggtcatggttctgggagcttctggcttctttcttacataatattgacaagctacactttgattagcattcacaaaagcatcacaaaaccaaatctgtataagtaggctgtccttttacatcctcaggtgaggaaaagcctaaacatttccttctgttttttagtcttccttcataggtcctttatgatttttgtttatttttgataagaattaaattatttactaaagtttcaaagagctggattcatagaatagggcctgagtgcttcttttcttgtgtctgaaggcagagatgaatttctcatgttgtagctagcaacaacaatttgctagctgactatatttcaggaaggctttgaaccaacaagcaaagactagctagctttgagtccaggggattagagcagttgaaaataatttttccactggaggggaaagtcagtgacttactcttacaactgttttaactcaggtttattgagtttgttaataaatctagttgaaaagcccacattctctatcttagtgtttctcagtgtgctctgcagattagctatactggaatattctagagggaacttgttaaataagcagatcctatggacctactccttactcagtgaaccaaaatcctgtgatgaagttaggggaggggatgttgaaaagcggtataattctataagttaaacaagatctctgggtcattcttctatttattaatgtttgagaaccaatgatgagtaaaatattctctttttattgctcacagtggagtttctaaaggcaatatgtacaaagtgctgcagcataggactatgcgagatggcataaaaagacagaagatggaccactgagatgacctgtcaattcattgattgtcttactacagttggctgaattgactgaaactccatctgctttgttggcacatagacaagactttattggtagaacgttgagagtaattggtttcatatgatttttagataccatcactaaggacttttgagtacgttttgtaagagactttcaggagttgatacaagaagggaaaatgagctcctgggcacctctttcacatgtagtgaagtaactcactccagccttctcctgactttcactgaacccctgaaggagtcgactgctttgctatggggctgaaagctggtattcatgtatattaggcaattcttgccccagagaactttcaattcagctgcataaataaagtaactacaatttgtaaaacctaaaacctattatatgttagtcaatgcaaaatgccagatgagtagaatagattatgaatttaggggcccagtgaaaggtgacattcctgttttcctgaggacaagaggttgtaggaaaaaggtcaaaggatttaagaaatattttttggatagtaccttagttatagttctccaaagaaacagaactaataggaaattggaaaccaatagaaaatatatatatataggtgtgtgtatatatgtgtgtgtgtatatatagaaaacatatatactatatatgttaatatatatgatatatatggtatataaatatatagtatatatagtatatataaatatatagtatatatagtatatataaatatatagtatatatagtatatattaatatatactatatatagtatatatagtatatattaatatatatgtagtatatatattttctatatgcttgtgtgtgtgtgtgtatatatatatatatatatatatatatacacacacacgtatacatattttctattggtttcccatttcctattagttctgtttctctagagaattgtaactaatgtactaatactatccaaaaaacaattcttaatcctttgacatatatatatatatgtcatgtgtgtgtgtgtatatatatatatacacacacatacatatatgtaatatatataatacatatatattatatataatataatatagaaaccttggagcttcctggatctgaatgtagatatctctccctagactttggaggttttcagctatattttgagaaataatttttctttaactttctctatctcttctttctctagtaatcctataatacaaatatttgttcacttaatggtatcccataagttctgcaggctttcttatttttttaaattgttttaccaccatttgactgggatattttgaaacacctcttgactggggtattttgaaacacctgtctccaagttcagaaattctttcttttgcttgacctagtccgtttttgaagtgctcagttgtatttttttatttctttcattgaattcttacctccaagatttttgtttggttcttttaatgctgtctatctttttgttgaatttttcattcagatcatgaattgttttactgatttcattgaagtgtttctctgtattctcttatatctcgttgagtttccttaatattattttgaattccttttcaggcattttgtacatttatttttctttgcagtctgttactgcagaattattgtgattctttggaggtgtcatgttttcatctctctcatgtttctctctctctctctctctgtctctcttcagagcacatatgtgtagccaaccacgatccctggtggactgaacaaagggggccaacgtgggaataaaagacaagagagtatatttggaagaaggggtcgggggcttcttgcctatagtggacaaaggccctgagctttttcagccctctgaatttattaggtaaaagagataatgagaaaggtggggggtgatttttgggtaattgtcagtcagccatttggttcacagcaggcttgcgagactgcatcctctgaacaacaggcactagatttcccagtagataacttcaagaagcctggcgccagggagtaatggccctcagcaaacctcctggcagcaggtgcagtcgtgagtttgctcacatcctgcatttatgataaacagtttgctgtttgatcatatagcctccagtggaatgtggagttggtcacaatccctttggcctttttggctcccaacacatatggcccatcaaacttttcccatggggggctgaaactatacctcctataattatttactggctgtgggctggcataggaagaatgtgccccagatatgcagctttgtgcagttgaggcaaatgctaaaggagccacttccaagggcgggggcaatgagtccttctttgcagagggatctgggaagctcatctttctgtcccctcactataattttagttcactgctactgtatagagcagtggtccccaagctttttggcaccagggaccagtttcatggaagacagtttttccacaggtcggggtcgggtggtaggatggtttcaggataaaatggttctacctgagatcatcaagcattagttagattctcataaggagcactcaacctagatccctggcatgtgcagttcacagtagggtttgcaatcctgtaagaatctaatgccaccactgatctgacaggaggcagagtgcaggtgataatgcttgctcatctgctgctcacttcttgcttggaggttcagttcctaatgggccacagacagcaccagcttgcagcctggggattggggaaccctggtctatagtaatgcaaaacatattgcttccatgtttctgaggactgaccatcaggtatttacaggcagtcaacttgcctactacattttatttgtaatcacacctggatgccatttacacatacttagtttagtttaagcatgtgcagatatgttacctcttcctccttgaaaggcttcctggttaccctatgtggctgtttgttcaccatctttgtatgggactttgaagctgaggacttggacagttcctagtgtgcaagtggtcagaagccctctccctccaaacccagtgacaatgtccctttagtaggattaaggtgccctgaggacctttgctttttaaattaggctgacacggagcttagcaactataagttcccccttatcctccctctatttatcattaatatgttgaacttctcagctggcgaaggataaaatagttgatagcaaatgaattagatatcaattaatttctaaagcaaacctaatgggcatttaagaagagaatttaatgtctcatttactctctatagctatcttgttaaatgccaattaagtatctaaatatttcctacaagcttaatgaattataataagtaaaaagtgattaccacttttttctaggatcttggcactctcgacttccagtgcaatgatactagactttttttctcatcctatttaggatacagataaaatagactaaaaccttcctaattaacattagctaccttatttagcaataaagtactaaatttatagtcaattctgaatataaaaaatatcagaatgcatgcagctagagaatatatgagtaataggatttttacttgaaaataaagtgagcactactaaagcattacctataatgaacgcctaatgtttcaccttctcaatgcctgcctcacctcaccccctcactgaaaccatttctagacaccaaggcagagagcatattagcagactcacacatgaattaatggggtgtgtgtttgtgattggcatggtacacaaaaacctaaaggcagcaggggccaggacagtggactccatcatacaaaatggggaaggttaaggaggcttggcctgggatctagcccttcaaggttttctctgccactctgggagaatagagtgatccttaggtttgcttatccaggctttgatatctaacagtgcactgtgggattggagagattagcagtcaatattcaggtggcaggcttaatgaactactgtttcactctaaggagggctctggtcctcagtgggagatgcagacggcaaagaagcagcccctgaaagtgagggtttgggtgggactgcagtggaaagaggtggagaatacctgccagacaggagtaacacagtgctcctgagcagtcagctctggtaacgtaactcagttacatcatgagttatgtatggatgtcattcagttcagaccatggagtggaggtcaagggtatgaaatttgggatcaaatagacctgagcttgaggcccaacatggctcatacttgtcctatgagcttgtttattttgaagattaaaagagagaatttgcttaaagcatgcaatacaatgcttaccaaatagcacacattcagtaagtgcacttattattagagtgaataataatggtaataaaaatattaaggatgatgaagtcactttgtttctgagagtgtatctgatttgtagactatccgtttgatagctcttccttccttaggaaagttagttaagtcatgattcagttccttcctaatgaaagttagttcagtacaacctgaagcatgtaaaatttccacgcagagtgttggtgtgcctgttccaatgatgtcgccactgcatgcaacattcatataatgacctcaagtgacaaaaaaaatccattatttttttcttccagagaatgaagggaacactaggtcattgttacatggcaacagctacttctcaaacaccttgttcaggaaataccttgttccaaatacatgctgcaaggctgagaaggactcttgcaactgggcacaggggtacaaacaccacctcatttcccaaggacagctccgctcttcaatgaggccattcatcctggccctacacaattactgtcgcttacacaaacagttatggagcattcaaatgacaaatgctaggcagccatccaagtcacatttctgaaaaatatttttattacaggaaaatgctcatgatgtagcattaaaaagggggaggaaagcaggaaaccaatcaaaagcagcagagaaaataactagtatagatccctgagttaaactcagcctcctttctctcacctccaggctggcctcaggaaaataccagacagaaatcaaaaggagacaaagatctaactaacttcatatgcatcaacaggcaatactggtctttactgtgatggttccttttggataccaaggcgggagttttgctaatcatgggaaaagttcctaaaattcccttctcaatagccttctcctaaagtccaaaccctccagtagctggccaaatttttgctctcctctctctctttttgcctccaaaatattctcattcctgagtttttttgttcatgctactatccattctctgtctaacctcctccatcttcctcacctctatttttttcttcttttggttatctctatgtgtaagtcaggacatgagaaaatgaacatttgagccacaaagcctgggtttgaagcctgcctctgaaattgcctagctggataatcttgggtgaatttcttaatctctctgtgcctcagttccaacctgtataatggggatgataacactaacacacagtctcttggggtgcttttcatgattaagtaagtgagtttatatgaattacctagaacattgtttggcttaagaactgaataaatgttcagcactatcatcatcatcatcatcatgtggattaattgaccttccctccagcttcttcaagctttttctccacccattataatggcttttctcccaaaaaaaaggggaggaaggatttgcaaataattcttacttaacatatatttaaaccctgtcatattattcaaaaaaatgcctgcatggaaatgaatctgtgttaagcagaataatggtcccccaaagatgtccatgtcttatatcaggaagctttgaatatgttaccttacatggcaaaagagtcttggcatagatggtgaatttaaggatctacagttggggaggttatcctgtggcccagtgtaatcacaggggtccttataagtgaaagagggaagtaggagattcagacaaggaaacagagatctagtgctgtcattgctgaaaggggccacaagccaagggatgtgggcagcctctagaagttggaaaaggccaagaacaggtcttcccctggagcctccagaaggaatgcaaccctgctaacaccttgactttagccacataagacccatttttagacttcttacctctagaaatataagataaattgctgtatggtaatttgttacagcagtaataagaaatcagtaaagtgtcaaaactatagctaaaaatattatgtatacaaagatagatttctgagaagttttccttttctttttatttgaactgtctctgtcttctaaaataagaaggcaaatgctaggctaagaaatgataaattacagatgcctgacacatgccaggactgttgttatgctgctatagaaagaacccaagcatgtggatttggagttactacaaatgcatggtcattacccatcactgagcttaaccatggttcctggctgttacaccaactccaccatccacttaagcagatggatggtggagacttctccatctgcttaagttctttttaccgatgcattgcaaactttactgtgtatataaagaatgtggggatcttgttaaaatgcagattctctcaatatcattagacatcgggaaaatgcaaactgaaatctcaaacaggtaccaccatataccactggaataactaagatgaaaatgactagcaagtcaccaataacaccaagtattattgagaatgtggttcaacttgacctcatgtatattactagtgggaatatagaatgtatttggaaaactgtttggcagtttcttaaatagttaaacatatatatagcatgagatccagccatcccactcccagatgtgtacccaaaagaaatgaaatatgtcctcacaaaaacccaattatgaatattcaggctgggcgcggtggctcatgcctgtaatcctagcactttgggtggccaaagagggcgcattatttgaggtcaggggttcgagaccagcctgaccaacatagtgaaaccccgtctctactaaaaatacaaaaattagccaggcatggtggtgggcacctgtagtcccagctactctggaggctgaggcaggagaatcactggaatccaggaggcggaagttacagtgagctgagattgcacaactgctctccagcctgggcaacagagcaagacttcatctcaaaaaataaaaaagaaaaaagaatatctgcagcagctttattcatagtagttaaaatctagaaacaatgcaaacagctataaactggtgaatgcagaaacagaaggtagcactcacacacagtgaaccattactcagcaacggaaaggagctactgacatacccaacaacacgggtgaatctcagaagcattattctgagtcaaagaagccagacccaaagacagcatactatatgattccatttatagaaaatgtaagctaatctctagtgacacaaaacaaattagtcatttcctggggctggggcagagggaaggagtgaatgtgaagaggagcgagggatctttgggagcgattgagcttttccgtgttttgatggccatggtggtttaatgggtatagatgactatcaaacttcatcagattttacactttaaatggatgtggtttattatatatagattattcctcagttaagtagataaagaaaaaataaagcagattctgatttatagctctgggctgggcaggcaagttaacatttctagcaattcctcagttgctgccgatgtactgggtcccaaaggctccagaatatcttctcttcaccttttgcacttgcaggagacacatttgtgtccaattttgctaagaaaatcaaggacttgggtaaggaaatcccttgaatgtcttttccctaccccctatgaatataaatccacttgtgcaacaatttgaatatatgcaagaaaaaatacttcaaaaggtacttctgctttaattgtagccttaccaatgccaccattcaccttttaatgatgaccttggcctgagctttaaattgaagcacgtgtgattagcaaccaaaaattgcattgggattatagtactttcactctaagtctttgagcaaatttctaggctttgcttaaaacatccattttcaggcatgattagaagacaattaaaatagaggggtaacagaaacaataaaattaatactttttgacccatgagggattagaaatagttcaagacaaaagcagaaaggatattggccacctcgtgcccttgcttagtgatattcatctgccattggacaaacctgggtttctctgtaagatgtaaggtatccatatgtaaaagaatcccttgacattggtacaaatccttcgcaaatcttcacatacttaaaaagcactctgtgaagaacaaagctttgttgagaagctgtttctaggcagtcttcaatgctgtctctctagtgacagaatttgtttcaattggagtccatgtgcaatccacgcccatgtctcaataaaataatcaattaaaataatttggggtctttagaataatggtaattgaaatgatgggtgctgtataaattccaaattccttgtgtactggccaaaacaaaataaaacgaacaaacagaaacactagagaaagcgatgggtatggctatggtagctataatgttttgtagattttattaactgtctatgctttcaatatctctaagataccattcaagcattgagaagggagctttaattgctgtctttccatctgcatttactcaaaacttacaccataaagaaatgttctgtctcaagtatcaatattgcatcaattgtgtttctgttcctctagctatttgcccctatggtgtcatttcatacattcatagaaacatggagaatttagaaattatggcccttctccagtacagttgagttttatctgtctatattacttggtgtttagcacattgtagctgttcaataaatgtttgatttcttacagaataatagtttgactttcaaagattttaaaaacaatctttttaatctggtgcaagcttggacaggaagactgctaaggcctagttagctcagaggcagaacaactgaaccaacctttctatgtgtgtcagacacaattttgttttcctgtttgaaaaggtaaaaacagagtcacctggctaaatggtttcctaaatgttccccctcctctgatcctcatgactttataaaacaagccaccacaaaacttctctaaagctaaactaacgtgaaataacccagggcttgaacttgtcgcatgacgttgctttaaattttaatacgagcttgggaatagatttgtgaacagcaaggtaaagcaaagcccatgaaatattgattctgtacattttcttatgcatttttattctccaatttagtaaatttttcatcttgcctgcacttaaaggttggctatgaagtcgttactaccaattgtattagctgttgtaaataaataattgtcgctaaagctgtttgcatgacgagaggtggacagggcctgctccttgtgagcactgactttccacagcccagcctagaaggatgaaagagatgaccacattttgcctaacagcacagtagcagacactttctaagggaaggagggttttaaataaagcaacaatgaagagctctaatgtttcagtagggactaaaccaccattctgacaatcatccattttggtcaaaaagaaggcagaattttttttttaattacaggacatcaggatagaatttcataacatgcatgcttcttggagataccctaatttcatggctctatgttagagaaattaaaagtgctagtctttcattactagccctcatccttgtatatgcataaaaagtcatattttatcagtcacgtgaaagacaactccattacatagttctcactgtcctcattctgtaatgtactcttcttccctagaataaacatgtatgcttctgtattcaacatatctaacaggaggtgagagccaaaagaaagatggaaaccaatacagacaacaaatggcacatcccttggtaaacaatgcatagaggatccagtgtggttctgccactgtggcaatcattctgattctttgtacagatttcatacattaactcattacttctctgttaagactgacttcagtttctctagaatcctggtcaaattgaccaaagaaaagacttcccctgagttccaaatttcttattccatgtgtccagaacataacaggaaaggagagaggataaaatcaggctaatatttagctttgaaatagctaaatatatctcctttttattttatcaggaattttgtcaccctgttaggcaaataataggatgcctcatttccagatttccccattttatatttattaaagttatatatgcttgcttattgtagaaagattttaaactgtaaaaacaatgtagatgagtttaactctgtttctgatgtctctacttgccaagaaagaagcaatatgggaggagaataaagacttccaataggttgttacctgcatttttggcaggtaaaattggcatacattttaagtgtttaaataattttaaatccatcactagtatgtttctctgcttacttttaattcctgaaacacttgatttatatgttatctaagaaagaaaaaaaacctacatagagtccaagtgggattttcccccctaagtttggtaagttttgtgtttgttcagtaagtctgtatacgggggttatgggacaatcttaaatttgttcattgaaaaccactgaatattgttgacttgagccatatattttgcacaaataagtcttcacctgcaaatacttgtacctcaagacagatatggcacaagaaaaagtatagcaagatgtatcaagtaaatacaactcccagatgcttggattaaacatcagtatgagcacagacatctttctcctcttaaactctccactccatccctagccaaatgtctattaaagaattaacaaaggtacagcataggcagagatgaccttagaacaagggaatggaccaatcaaattatggatggcttagagaaagttttggtagatatagtgcacaaggcaacaaacaggaatatagaaagagttcaacttaaaactctttcctcagaaaaggcattattaccctgaagaagatacaggggctcaggcacttatctggaggggtaagaattgggtacatgggtaggccatgtggtagatggtgacctcataatttgggcttcatttgaccttcaagaatcagcatcatttgtaacagcaagactttgagtgtccaggattagaaaggcagccacttgaagaagaaaggggcaaaaatggtgaggacctgtacaaaaagaaagaacttagagcttagcctgagggaaatcattaagtcttcccaatttggggtagaatgtgaggagagctcctgtggttgatgccctgattctgtgaccagcactaacaagatcagaagcgtctgaaaccagaggctttagggagacatagtattcaagttgctgttacatcaaagaaaaccctttcagggttacagaggcatttcctccatgtatcaagcaagagaaccaggaaggagcctgggcatagccaaagtttatattggagtacaggttgtgccaaataccaagtgaatacaaaacattgagctgagagcaatagcttcaccatgcatggaaagaattgctgcagagataaatattcctgtgaatgctactcagagcccagacttcctcccaactcccctctggctgctcaataacaatgagagtgttgtaaatttacaccaaagaagccctccagtttgagatctgagaagccaagaacaaccaaggggaaccagaaggggaaggaaagacaatttactcaaaatgtttatggaaaaacaccagctctgcttacatatctcatcacttaaagatgaacaactaaaacaacaccaacaccagctctatgaaaaatctcaaaatatgaaatattgagaaaatgcatgcaatatgcaaaagacataatacaaaaaagagacaatgtcaagaatgtcttcttgtgcctttaatactatttgagaaattaggggctctgtgaaaccagtgatgagaaatgggataaaaatatttaaacagaagagagataggcaaaccataggcagttttcaatagaaagctaaacaatataagggagaggaatgcaaggactgagttcagtacctattttaggaaccttaaaatgaagagaggatactgcaagagtcaaataagtgatgtggagtacaaatcaatcaggcttgcctggagtagagaggaaaaagtcaggtgatgagaaagaagacgctaggaatgggaaactagaacttagatagaagagacctaatttgtctctggaaaagatcccaaaagaaaaggaaggaagcagaaatcagagatataacagaagaaactttcctgagtaaaaaaactgattccatggaaacaccaccatgtgccatagagcattcatgaatacaaaggaacacctagatacatattgtcaatttctttttaatcttaaggaaaaagaaagaatatgtcaaacataaaaggaagagggggttgctaaacaggaagaatgggacatccatctaactcaagactccttttataccacaagagatgttaggaaaaaatgaagcaatgtctatggaactgagagtaagaagctggaatctaggaattctaaactcaggccagattctgttcatatataaaaacaagaataaaaacaaagagaagtaagagagagagagagaggtctttttcagatatgtaagggctccaaaacccaagcaagtcttatattttcttaaaagttgtagcaagtttgctttatacaggaattggttttggtggatgatgagagacaggaattcagaattcttttttctcatttggataaccacactattgctgacttggtcccatttatgacattttccatccttttcacaatgatttaataatttttaatgccccttatgctatatacaaagttcccttatatgtatgagactacagttatgctatccattttgtttcattaatcaattcattcatcactgtactaagactacattaaatattaataaagcattagaataaattctgatatttgataaacctaggcatccttcatttttttcttttcaatttcagtattttatttttgttggtcaataagaaaggatgttttagcctgctatttgtaaaacttctgcaaatttttttttaatttttaatttttatgggtacatgctaggtgtatgtatttatggggtatatgggatagatattttgatacaggcatacactttataataatcacataagagtaaataggatatccattctttttcttccaaattgtcgtggcaatttaagaattgatttatcaagactcataaaaactaagtttttggcttttgattggaattaacaattaaggtggagatgttttcatgatattgagtactcctgggacatattccatttgttcagttttttttttatgttctaataactgtttataattttctccatgaatattttccacatctttgttaggttcctactagatatctaattgttggttgtaattgtaaatgctgtagtttttctaacttattttctatttgattttgctgatatacaagaggagtattgaatttttggtttgtattaaacagatttggtgaattattttagtgataaatgtggtttatggatttttatgaattttctatatgtgcaactatattacctacaaataatgacacttttgactcttggtttccatttttccacctctcttgttttcatgctttgttgcattggttatggcctccagtggaattttgaagggtggggtgatttctgcactgactttgtgatttctgtttaacatgtttctttcttggatcctcgaatttagatttaaggcctggacaagttgtcttttttcccctaagtctctaacttcctgagctccagagttttcttatgaaaagagagagaaaagaaaaaagaagaaaggaagcaggagaaggagaagaagaagaaagggaagaggaaaggggaagggggaaggagaataggtgacaaagaaggggaggaggggccaggggatgggagggagagggggaagattctaaccaatgttctttttttttatttttttattttttattttttatttttttttattattatactttaagttttagggtacatgtgcacaatgtgccggttagttacatatgtatacatgtgccatgctggtgcgttgcacccactaactcgtcatctagcattaggtatatctcccaatgctatccctcacccctccccacaccccacaacagtccccagagtgtgatgttccccttcctgtgtccatatgttctcattgttcaattcccacctatgagtgagaatatgcggtgtttggttttttgttcttgcgatagtttactgagaatgatgatttccaatttcatccatgtccctacaaaggacatgaactcatcattttttatggctgcatagtattccatggtgtatatgtgccacattttcttaatccagtctatcattgttggacattagggttggttccaagtctttgctattgtgaatagtgctgcaataaacatacgtgtgcatgtgtctttatagcagcatgatttgtagtcctttgggtatatacccagtaatgggatggctgggtcaaatggtatttctagttctagatccctgaggaatcgccacactgacttccacaatggttgaactagtctacagtcccacaaacagtgtaaaagtgttcctatttctccaaatcctctccagtatctgttgtttcctgactttttaatgattgccattctaactggtgtgagatgatatctcattgtggttttgatttgcatttctctgatggccagtgatggtgagcattttttcatgtatttttggctgcataaatgtcttcttttgagaagtgtctgttcatgtccttcgcccactttttgatggggttgtttgttttttcttgtaaatttgttggagttcattgtagattctggatattagccctttgtcagatgagtaggttgtgaaaattttctctcattttgtgggttgcctgttcactctgatggtagtttcttttgctgtgcagaagctctttagtttaattagatcccatttgtcaattttggcttttgttgccattgcttttggtgttttagacatgaagtccttgcccatgcctatgtcctgaatggtaatgcctagaatccagcagaacatcaaaaagcttatccaccatgatcaagtgggcttcatccctgggatgcaaggctggttcaatatacgcaaatccataaatgtaatccagcacataaacagaaccaaagacaaaaacctcatgattatctcaatagatgcagaaaaggcctttgacaaaattcaacaactcttcatgctaaaaactctcaataaattaggtattgatgggatgtatctcaaaataataagagctatctatgacaaacccacagccaatatcatactgaatgggcaaaaactagaagcattccctttgaaagcgggcacaagactgggatgccctctctcaccactcctattcaacatagtgttgtaagttctggccagggcaatcaggcaggagaaggaaataaagggtattcaattaggaaaagaggaagtcaaattgtccctgtttgcagatgacatgattgtatatctagaaaaccccatcgtctcagcccaaaatctccttaagctgataagcaacttcagctaagtctcaggatacaagatcaatatacagaaatcacaagcattcttatacaccaataacagacaagcagagagccgaatcatgagtgaactcccattcacaattgcttcaaagagaataaaatacctaggaatccaccttacaagggatgtgaaggacctcttcaaggagaactacaaaccactgctcaatgaaataaaagtggatacaaacaaatggaagaacattccatgctcatgggtaggaagactcaatatcgtgaaaatggccatactgcccaaggtaatttatagattcaatgccatccccatcaagctaccaatcactttcttcacagaattggaaaaaactactttaaagttcatacggaactgaaaaagagcccgcatcaccaagtccatcctaagccaaaagaacaaagctggaggcatcacactacctgacttcaaactatactacaaggctacagtaaccaaaacagcatggtactggtaccaaagcagagatatagatcaatggaacagaacagagccctcagaaataacgccgcatatctacaactatctgatctttgacaaacctgagaaaaacaagcaatggggaaaggattccctatttaataaatggtgctgggaaaactggctagccatatgtagaaagctgaaactggatcccttccttacaccttatacaaaaatcaattcaagatggattaaagacttaaacgttagacctaaaaacataaaaaccctaaccaatgttctgataccactgcttctgttttcttccaacccattcttctcaaagcagccagcaaagaaaaataaaaaaaaatgtaaattagattatgtcacttctttttgcaatgtccaacaatgctaaaagacacacgcgcgcgcacacatacacacacacacaccacacacacaccccagaatgcctataaagatctgctcctgcctacctgcccagtctcatcccaagccacagtttcctttggtctctgtattccaggcaccctgcttccttcccattctcaaatgtgccaagctctttctcaccttattgctttcatgggcattattcacgctgtctggagcctactgccctccactgttccccttactagcttcacttccttcaagttttatatacaatgtcatttacctagtttaaattaggtcaccctgtaacattccagtgttttagaacaaacatctgtttttcaactgaagcaaattcccatagccaaaaccttttaaagtgagcaattcagcagcatttggtacattcacaatattatgcaacaatcacctctgtctactcccaaaacattttcatcaccccagaaggaaacattgcacccactaagcagttactccccactgctcactcccctcagcccagagcgatcaccactctgtgtctagtctctgtggatttacttattctagatattcatataaatggaattctataatgtgaccttttatgtcaggcttcttttgcctagcattatgtctttgaggttcatccatgatgtagtaacgtataagtacttcagtcctttacgaggctgaatagtatttccttgtgtgtgtgtgtgtgtgtgtgtgtgtgtgtgtgtatatatatgtatatatatatatacatatatatgtgtatatatgtgtgtatatatatatacataactcattttgtttatccattcatcaactgatggacacttggattgtttctgccttttggccattgtgaatagtgcagctataaacattcatgtacaaatacctttttgagtccctgttttcaaggcttttgggacaccatgctcttttaggttgttgcatgtatctatgcttctagtgtggtacctatgtgtatgattctttgtttagtgtctgcttgtccacactatttgctgaactccatagctgcaagggacacttgtttttttcaccattgtagcatctgacatgaagctgaaccataggagatatttgacaaatatgtgtgaatgaatgaatgagaaagcaagttgcccagattgacgaccaagctaaaggatgagacttggggataaacttttgaggtatctggaatgagataaggtgaggttttcatgtggttcaatagcagcctcttcctgtcactagaaagacttggtcactatcttcagtgaccaagcatcattatatctgacacattccaaactttgaaaaccccacatagtacaagtttagggaaaagagttttagtcatactttgcctgttccaccgaggccttagttggtgatgtccacagcaaaaactcagatttttgctcagaattccagctagggctctccagagaccacaactcccagggcagagctcattctgcatttccaagcttttctttctggatatcttcagcaaggcagaactggacaaaggtgaatgacattcaaggttaatcatgctggcgttcgtgattccagtgactgtatttgagtttgtttttcaattgttcttttgatggctattctacttctgcgtgccaacattctcagtttgtaatgccaactgtgctctgtagtgaacaagaacaagcctgctgcgtagtgtgagggtggcagcagcttgagcatttttatcgtctactcattgtctctgctgctgtgtctttcagtcctcctctgattctatcaatgagtctctctccctctacctttgctctgtctctgttttctgtctgtgtttcactctgctctgcttcatgtttctctgctcttcttcccgttctctctctgtcttcacctttccttgtccttctatgcctctcctaggggaggggatcatgtgctgcacaaaccatgtgtgtatattgttctgtctcttcaggctgttgttatccctgtcaataaacttcttcctgtctccaagtgactggtcctatctcctttacaatcaggggagaccggaactggctgcaatgaatgtgaggaagtctttataattaacaggatctctctgccatttacacaaacactttaaactacatagggagccaagcataccgtttgcacgtctgatgagaaggtaataaatgtgggggagtgagtggaaaaggggagggcagactgaggttaagtaacagggagagggtgctgggaggcatcagattaacacagggtggggtgggtatgggacgtttgtatttagctaggctccataattatgctctgacactttctaggtgccaggcactgagctaggctttaggaatagaaagctctaggggtagagactccaccttaggtgaatttagtttaagaagaggatgtattaacaagaagacacaatgtctgagtgcagtagagaagcagatggtgacttgtggatgctctcagaaggagagaaggagatgttagaggtgcagtgatgtttcagtggagccttgaaggaagaaaatgatttgggtagagagaagctgcagaaggcaagacattcttggctataggaaacatctgagccaatgctcagggttgggaagtcaaaggtatttgaggaagaatgagaatgtcctggttttaacagattggggttgggagaatggggagagaaatggataggcaggggctgtgatgtcagaagcaccaagtgtcccataggattctgggccattactccgtggggagctagacaatgtcatgaaactctatgacagcagtgtccaatagaacctcctgcatggcagaaatgcttctaacatggtaagctgcacagggatatcaagaattgagtccttgaaacgtggctgatatgacaggggagctgaatttttattttttttaaattctaatttattgaaatataaatgtaaatggcccagatggctgatagctgctatgtaagacaacacacccctgagatgtcatgaccagcatctctgagatgtcatgaccgtattgtcaggtaggcagtctggccacagtgtgacaaagggactggagggcctgatacttcagagagagcaatcgggacattcatggaaggaggggcaggtaaggacataaaccaggtgaggaccagggacactcaggattgagcaccttggctgggggatgtcatactggggagtaaagcccagggatgggcctctgggaggtgctggcccatgcaactggaggccagcagcaagctgccacagtgttcatacacccaagggtatacatcaggcctgggatccaggttgggaatatgataatgagattgtgaaggtctttgatggtaatttagctgtgaatcttggaatatctaaagcttgtctttgataagccatcccttccctgggatctctaagaatatattatgtggccgggaaacacagcaagccaaaaacacctcctggctcaaaggtcctaaaactcaaaggtgccatagggcctcctctgcttccttttcctaatgctgcatttcatcttctgatgaaaaatgaatttaatttaaagcaaagcaaatttaataaaaatccagacaggtattttttttttatttgttttggtggaacttgataaaattggtcctaaaatattcatgcaaaaattaaggctcagggatagctaagatacttgtgaagaaggagcaaaggagtcttgttctttcatacagcaagatttatttcaaagatatgataattgaagcagtgtaaatttggtccacagatagacaagtaaatcacagcaacaaactaggcagtgtaggaaaagctcttaaacacacatggaaacttataaaagatggcagtggcttgaacataggtgatgagagggatagttctagtcaataaatgttgtgggaagaacggtgatcctcaaagaaaaaaagaacatctgatccctgctttagaccatatgtaagcatcaaatctagaaggaataagcagtaaaataatagaacttttagaaggaaattaggataacatatttatgaccttggggtagataggtttttttaaaccataaacaaaaagcaaaaattataagggataagatggataaatttggctaatgagatagtctctcatataacaacacccatctgtacaaataactgccaaaaggttactatctggaatatataaagcactactataaatcaataatataaagacaaacatttcaccagaaaaagtgaactaaagattcatacaaacaagggaaaaaccgaatatggaaaccaaatagccaagctgtatataggaaaaagtgttcaaccatattaataagtcatagatacacaagttaaaatacaacagcattccccacccattttgtgatgctgatttttgctgaataggtggagaaaggcatactctcacatactgctggagtgactgtaagttggtgtgattcacttgaagatcaatgtagcaacaacaaatgaaattgaagatgtacacactttatgacctagcacttcaattgctgggtatttaccctcaataatctctcctacatgtgcacaaacacactcatggcagtgctacttgcgcataagggaaattggacacacattccatgacaaccagtgaggggtaaacacataaacggtggtatagttacataacaaaatactatatagaaaaataagttattgaatttagtttgaataaactgaatggaccaaatctacacatatcagcatggataattctcaaaacctgatagcttgaaacctttttttgaaaatacttcaatagtgtctgagactttttattcccctacatcagataatcctgttaagttattgtaattaaatcgatggtggttgcacaatttataggtccttcagatcgtaattttaataatgttatttttaacattattaaagaataataataataagtgacattcattaagaattggccaatagatagtatgttaaatgtatttcaggcattacctaatttaatcctataataatcccttggttattataatataattatagatgcgattattattcccaatttacagatgagaaaaatgaattaggaaaatggtattaaataacttgttcaaggtcatataaaaaataagtgatagaggaacaaatattcaaggtcaagataggggcgtaatataaaatctaatacaaggcttctgatattaagtccattggacaatgtgttcaccagagtattattttaatgagatttttctgataataaaaaataatttggaagtcacagataagcacaaaaaaatgtaaagaaaccataactctaccacttggacaatacattttaatatttatgtgtttgcttttaattttttaattttagcactatgtgcaagtagtggtagggaaaatttctaccccaagaaataacttaattattgacctattctgatctatttctggagtttttggaaaagtttgaactcttcatatgctggtcttgggagaatatgaaggcatgatggtaaacagaccttcactgaagttctagccatctccccggaagaagccacattgctgctgtcttcccaagttattaaaagtatggctgttaaacccaatgggttcccaatgaactccatcttatacttctcttagatagggggaggcttttaatacctttctcatcctccccctaccatcctcataccaacctaggggagtgaagttacccatcagggcataagtctcggtgtgtcccatacagcacataaatacaggacatctgctcagagatggggtcactgcatgataaaattccatgcatgcacctatgattctttcatttcttcttctacatggtcatattgttaggtgtattcacccgccttgtctagaaaacacttccaggcattatctagtggcaaatgatgccctgcaaggggacatttccaccaactgggtctgttcacaaatgtgccacaaattccacctacaactccaaaataggagtccaaaaatagttgaaacattggcagcctcactgagaaggagagtggcttcccgcaggggccgcttctgagaagacaacttcattttgacagatttgtgctggtgtgtctgttaacaacatagtcttctcacttttcaagcttctccaggatttcccagggcttggagagatgtttgcacaaactagcttcccgagataaatcccaagtcacgtagccagggcttggcatcaaattgaaagacagtgcaaaggaaattaattaaaatctggccggagggatccaacagaagcagacatttcaagtggaatcaatacaaatgtaagcgccacaaaggctgtgactttttgcctattttattcacggctaaatctccaaagctagaaacattcctggcacacagaatgtgattaataaatatttgaatgaatgagctagattcagttcattctgcatttgttgaactgctactgtgtgaggatttgggagctggatttacaaaggtcccagactggtggaggaaagaaatttaaaacaaaaaacaacaacaaataactatataggatatgttaaatactgtgataaaatgtgtaaagtctctgggggaaacgtgaccaagatataattaattgtactggcaaaggatggagtagctgcagaatgaaggtaacattctaggacttggtagtgttagcaggtagtaggagcaaaagggctttccaggtggaaagaggatcacagacaaaaatatggaggtgtgaaaatgagtggtgtatttagggatcacctcatggagttaaaaaagcagctaccaagagcaagggcaaggggggccctccctcaacagcatgcagagacaccgtttgttttgttttgttttgtttttaagagcatctaccaacttccaggcactgtgcatgtttagtagtagagacacaaagcaaacagcatagatgtgcccttggccacaaactatttacaatctgataatctgcagtgagacatgcatggccaaggctgctatcttattcttctttgtatttctgaggtttcaaatggatttggcacaaagcaaatactcagtaaatgttggatgaacaaatgaacaattcagagcagtttgctaaattggaatgacaaataaaaatgagaggcaggcttaggctatactttaatgcaaagcaaaaaagcagagaaagaaagagaagtagcatgagtttgaagttaactagctcaggttcaaattctggtcctactaagtgtagatgacctataagaaaatacttgaaatctgtgagcctcagtttcctcatctgtacctggatcatcaaggccagaacagccagacacataggcaaagctctacctaatctgttattaggggcacacactctgcagagaggttttagcactctgaggcactcagtgcttaagaacatctttggagatagacaaactcagtttgaagtaaagctcaaccactgtcagactgcacaacatcaggaaagctatttaagttccttgcagctcagtcttctcatctgtgaaatgggaataataatagtatctacctcacagggctttgaggaggattagaaaatataaagttggtgcctagtacaaaccaaactttctaactaaatggagcttaaattacagttgattctaggtgggcttgatatttgatattttgaccactaaatggtaatacccctacaacaaaattctaggtgggcttgatatttgatattttgaccactaaatggtaatacccctacaacaaagtaagctacacaaacattgtgttttgtattgttatgtatcaagctatagcaacttagcatcttagaacaatagacaaatattatcttacagttctgtgagtccagagtctgggctgagttcagctgggtccaggttgcaatcaaggtcagtcagggctgagatttcatctgaggctggactggagaagaatccatttatgtagttgttggcagaattcggtttcttgctggctgttggccaacagctgcccttagtttctcagcttctggctttctccatagggcagctcacatggatgagaatctctaagcaagatgggcctgacaatcctatgtatcaagtcatgagagtgacatcccactaaccttgcagtattctgtgggttaaaagcaagtcacaggtcccgtccacaccaaggggaagggatggcacagggcgtgaatgccaggaggtgaggttcattaggagtcaccttagtctgcccacaacaagtgcagagtgtctttctctcttgttcctcactggattatcagcccctagaacagtgcctgccgcatggcgtgtcctcagtaagtaaatgtattggataaaagaatgggaagatcataaatgtggtttctatagtggtgtgtgtgtgtgtgtgtgtgtttggggaaaaagaaaggagtggatgactgctacattctgaattaagctgagagcagaggtgatgaagaaaatgtccaggcaactaaggagtggtgttgaagttgcccactcctacctttggctgatatgagtagccacactgaacagactgagacagagccaaattgcaactcctacctttccctgggacctctggggtgttcagtagcatacaccaaaaggaaaataagatcctcattgtggacaagtgctcacaacctttaccatgatcaactgtcactctccttccttggggtatgatcagcagctaatgctaccctacagcacatcattcgaccttctcctgatacacaaggcaaatactttcattaacaaaattaaaaaagagtaaatgaaaatatctcaaactaaaggaagagaaaaaatataataaaaataaaaggaagtcacctgaattaggttttcagaccctcaaaggaaacctttgttgtgaggaaagactcagcctctaggactggatctcgggcaggtcagggggaagatggagctcggagccagaatccctgtgggtttggttgtgggctcctgggctcctgctccatactcatgttaactgtgtctgaggacagagtgggttgccatataagctggtaggaggcctgtaaagagaggcagcatttaagtttatggacaaataaactttatcatgaaatgaacatgtgcctgaaggtggcaaaagctctgcttttctttctgttggctgggatttgagggaagggctttgcggatgaatggatttaggaggcagccagatccacatagccccgaagaggtgcagatactgcccaaactgcacctctctgcgctctgagtgcacccaaagcccagacaatggcaggcagggccgaccagctccttacaccacacacatgtttcaaaggaccttgggagcaggttttcatgggaggggcaacagcaatgcttggatggaagaagccgattgaaatcaatgagaattgatttagagtgtgggggccaccgtgttaaaatctcctccctcttgatagcgcttcatgaatattaacaaggttaagatcaataatgagctgattttcagatgcaaacctgacttcatctgcagattaaaggaacggaatgatggtgtttcttcttgcactgctcccacccatatcttagtggatctaagaccccaaaacccaaatgaaacctgcaaggtgcaggtcacttcatgcattgtcacataaaagtttgttgtacatctgttctctctgtgcttagattggaggatgttggatgttctgtgttcaaagcctgtatacaaatgcatgtgtgtgtttacatgcattcattcatttattcataaattttgtttccatcagttttcttcaaccctattcttgatctttgtcatatctcagcttttcccatggactcgtaattggtttcctggatttcagtattgttctttttcaaatcaccctacaaaactctataaaaatggtttatctgaagatctgattcaaacaagtctttcttcggctgaaaaatctgtccaatgttccccattgcctgcaggatgatgtcctaactccctagtagagacatgtcaaaactggggtttagcctcaaactgcatgtacactcccacaatgtgtgaaatgtctgcatttcagctggggcctaaaggatgagaatagactagttccaagaagacacagaggaagaacattctggacggacattacagaaaatttaaaggcccaagatagaaaagatcacagtattttagagaacagaaagggaccaagggtatgtgtgtgtgtatgcgtgtgtatgtgcgtgtatgcatgtgtgtatgtgtgtgcatgtgtgtgtgtatgtatacgtatgcatgcacatgtgtgtatatgtgtttgtgtgtgtgcacacgtgtgtgtgggtgggtgggaactgatcatttagttataaatcacccttcaccctttcctatttggctgttgcctgaacactcttccaggatagactgggttaggaaagaagattctaggcatttcgtgggaggtattaatcagtgtaataattgtggtgcatgttgcatactgggattagatatttttaatagcataactaggttccctcagtgtagagggaacctgggcagaagctaggagcccaccttagctcacggggagtggcagcaagaattctgagagtgactttcctccctggtgtagactctcagacttcactcttaaacctgcgctaagacttggctgagggttcactgacttcctctgtcctgttagagagcctaggaccagtgctcctccccgtatttttgaggagtcaccttctctggtgcctttgagtgaggtcagacacttctcggaacaccacttatcgagaatttcccctgccctgagtgcagacagggtcatgcccatttagctgtttccattaccgcctggcccttcctatcttccactgagatttattaggacctcagaggcatgagccatgacctgggcctgatgctttagatacacacagtacatttacgccactccaagttctttcccctctgctgtcgtttttggttccctcaaagttcaaaagtgtggcaggatgtgtcctaccaacccccttttgcagatgttgaaaccaaggcctaggcatcctaaatgatgcccccagtcccacccactgtgaatggaaggtggaagtatgctggattcttctgcctaattaacccacctgtttcctttctttgtgcctctacatggtcccagaattggaaaagtttatggatcatggaaaattggttttcatgtaaatccgtgttccataactcagactggacctaactctcccctgcagttttacagtgggttggcccatactcccattcttcccaagggctacttcaaatcttttttactttcccaaaaccatgcatcctgcttcttgccccttactgtcagcaaatgacctcagctccctacttgcaaatggaagctcccctcaccattcagttagagaacaagccaacaggtctgccgatgccacccctcccctgccttcctgccttccacagcagggcagctgccgcacctgagcttcaggtcccagcccttcccaccctgagacctttcaccttttcattccttgtctttcttgtaaattcaatctccacctctaaccagaaaattctctattgaattctaaaaatgctcaagtctctcctattaaaaacaagaaaacaacaacaaaagtcccacctcattagacctcttcctctctcagcttctgtcctacctctaccacttccatcatagtcacgtttctctagagggttgtatgtgcttactggctccatttttttttcacctcccatccacttctcagttcacactaatctggtttctgttctcatcactcactgaaaaagtcacgatgaccttccaagtcgctaaatccaatagacctttatctgtcattgtcttccttgaacccttcatggcattcaattccagagcacgctccctctctctttcttgaaatactcttccactggcttctgtggcagcacattcccttggtttttctatctctctggaagctttctctccgtctccttttcatgagtctcctgaatactgccattaaatgtcatagttgctcaaggctcagcttgagactctttcccttcttaggtgaactcatctcatatgaccttaatttccgactatcaggaagatagaaatatatttatttgaggaaaaaaaagaatgatacatgttctctatatacgaaactgcccagttgacattctcttttgaatgtcttaagggcaccaaatactcaacttctagaaaaataatgtcaccatcttttgcctcagcttcaaatctggttcccttacagaatccccttctcacactggttgccatcctccagccaggagtgcaggccagaaacccaggaagtcattttcaacacctttattccttaccccatccaattcattacccagtcctgtaatatacattttaagtattttgctaactatatcccttactactattttggacctagaaagcatactgaactgaaagagcagacctggcacaaccagtgacaatctatatgatcctgagctaagctaggcacgtggtgcagagaccagtgagggctattgtgaatagaagctcctgcaggtgaacagggccaagcaggagattatgaaatctcaataatttccaataattctttaaccctaatgatggacttagtttcctaatgtagtttaagggctttaaagctaaactgtccagtccagatttctgcaagtaaaactcagaaatgggtaacactggtccttattggaggctattaagagaaggaaagcagctgccttcgacagaaacatattgacagaaggagtgggagtgtggacctgtaagaggtttccaggcatggtttacaaagtctatccaaaggtcttgtttcacctcaagttcatcaatgcttgcagggtatctttctgtggctgtaaatactcctctgaatcttgctcattcctaacctggagttctaaattcaaagcagttaacccttcaggaggatctgagatttacatgcaaggagatttactggtgagtgctcacaggaatatcagcacagaagacagcagcaggattgggcagatggaggagctgaacggtgctgtcattgcaagagcacttcagccaaacacacagggatgctgtgatgaaccccagagacttcctgaattggagcaagggaccaagcctttgtacctgctgctttggctattaatggaggttaataaaggttgactctggggaaggggcttagtgttgagttgggcaggttcctttagtcaatggcaatttccacagaaggatgaaggtatgtgagcagtcgggagcctcacacctggaagctgggtgaaggactgccttggtccttgtcctgaagaaggatctgagtgctgcagcacagcatccactgtactcacttggccaggtgtatcatgatctgctgctgttccctaccctgtctttccttctttccttctcctctcttatgaggtgattcataaggaggctccagaccttgcttttgccttttttttccaattagaattgcttcccttcccaacctgtagcttcctcttcttcttcactctcttatcttacacccttaaccaaactccagatccaacctgaacacacctggcacatcactcatggactcccacacttctctctcactttcttcctttccatgcccctctaactgtctctatctctctatctatcatatctatctatctatctatctatcatatctatcatatttatctatcatatctatcaatcgtcttctctatctatgtatctatctatctctgtcacatctatccatcatctatctgtctatctgatctatcatatctatcatctctattatctctatctatcatccatctgtcatatctatcctatctatttatcatctatctatctatctatctatctatctatctatctatctatctatctatctatctatccatccattatctctatctatctatctatcatcatatctatctatctatctatctatctatctatctatctatctatctatcatctatcaatctaggtatctatcatctatcctctctctctctctctgtaaatatatctaacttcaagcctatctcaggccactttattaaaatatcagtgttgtagctgagatctgagtgaagatcctactgtcttcactcagctgtggtggtattcctaagagcagtcaccaaataaaccttgcatgtaaatatcatggtatatgtaattgtcattattcttttaaatttagtttaatcacacagctgataggctttcagtttaaaactcttcaaatgatacacagcaaaattcaccacttaatatcccctccacttcttgccccagaagtgattcacttatcaattttttcatacataaatatatataaaaatgcatatagatgtgtggtttacttctgtattacattggacatatgccttgctacattctttactcacttaacaatatattgacaatgtatgttggggctgactagtaccagcttgtgagagccgactgtgtggatctcttcccaactccactttcagtatcatcacatgggtagcctgtgattggccatggtgggagtatttacaccacagaaggcagaaggcagcaaaccctgccaaccagtgtctgtcctggagagccggttgttaaacatatactagttcactgctgattgtagaatcgtttaatgtccatttgtatacatttattttgtcttaattcttgcaaaatttttaacattatgaataaatacagtttagccagtccctgaatgaacggttttcagattatacccacattttcacttgcacacacaatgcttcactgaatgatattttcatttttggacaagtctgtatttttctcgtaaagttacttagcagttgtactcttgggttgaagcaaatatgggttttatatcataatagacaaggctaacctgtctttcaaaatagccactaatttacaccttatcgatagtatgtatcagtaccattgtgatacttttgtgatactgccagtctttttaataattgcacatagccaatcttccaacttgtagattccttaggcagataaagggaaaactgctattgtactgaagtattgctattagtaaaaatatcatgataatggcgataacaaagatgataatggtaaaatagttttaaaagtagtcatgcataattatgttttcaaatatggctgctaattgcgcaaaaaaactgatattctaagtttttatcttctttttgcaggagatgtggctcctaaaatcatggaaaaaattaacttggagtttaggcttgtgccactaccctgagtgattcaaactattattgtgcggtatataattttttgaccaaaaaatgttaactataactttttacacagggcatttaatttaatcacggcgacctgaaatcatagtctttccctgtaatggttttaaagtaccattccagccactcaggatgaagtgctcaggaataattcaggtgcctcatctaatgccctcacttatagacctccggcagaaaatggggattctgcagtttgtttttactggctgtattgatctgatctgaagaatttcttcctccacagctaaatcagtaaattccacacttagctggcattttgctccagtacttatacggagagttgaatttggagtcatgaaacaatatattgtcactgttactgatcctggcgcattgctattaaggggagtctataaaattcttgcctgtgtgtggaaaatcactattgccaaacatcagggatgagataagcctcttgaaaataagatatgcctgcttatattccattgtatatctctctagtagcctttggtgtgaatcatgttatttgagggcatatttggctttttcaaattgttaatgctcgtggaatctttcttcagagatcaagttttaggctttttgcttccttttcaaaatcaggggctactaatgttaaatggactttatatcataagagctaaacatgattgagctcttcctgtgtgccctagtgtgtggtaggcactttttcatcattatccaatttagtcttcacaactaccttgtggagtagatattattattactcccattttacagatgatgccactggagcttagtggattaataaaatcacacagctagtaaatgatagagctcagagagtcaaattcagggctcttttctttagaaacccagccctttcctgaggtgatatcctcgaattaaattctttttttggggagggccctgattggtcaacacatcctttgatgggcagccagctgggcagtgatcaagagtggaagcaagaggccagagccttaagttggtagaccacaagcccgggaatgtgtttcctcttcctttgtatttcagttaggagactgtaaggctggcccactcctcatcccttccaagactccacaaaaactagctcactgatcatgtctgatttttcaccttaggtaggcaaaaataaatttttagagaggaaaaagaaaaaaaaatacacacacacacacacacacacacacacacacacacacatccccaataagcattaaaaaatagcatctcagggaacaaaggatatgcttgattctacaggcattccagcttaaaggaggtcttgttctgttaaagcttgcagaaaacaaaagggctgcagctttcctggatttgatgtttctctctagaggagcagtgccattcaaactaatcaaagttttactgggttcagaaatgccaaaccagcacattttgtattcctattcccccaaaaacactgtctgcaagtgaaaaacatctgcatctaaaacaagacaattaacaagaagacacgcgcgaggctgatgctaatgctgcggtctatttttggttgccagctaagtgaggtgcagaagcagagaaggagagcgtgcctccctctttttttatttttttcatttttattttttaaactgcggtcaaatgtacataacataagatttaccatttgcaccatcttttaaatgtacagttcagtggcattaagcacattgacattgttgtgcaaccgtcaccaccatctgtctccagaactttttaatcctcccaaaccgaaactccatactcatgaagcattaactaactcccaactcctccctaccccccaactcccagcaaccacccttccactttctgtctctgaatttggctactttaggtatttcctctaagaatcatacaatgtttgtcctcttctggctggcttatttcacttagcataatgtcctcaaagttcaaccatgttgtagcacgtgtccgaattttgttcttttaaaggctgaatgatattccatcctatatatgtaccacattttatttatccattcattcgtccatgggcacgtgggttccatccaccttttcactattctgaataacgctgctatgaacttaattgtacaaatatccattgtgtcccattgtttccctgctttcagttcttttgatgtcaagaagtggaattgctggatcatagagtaattctgtgtttaattttttttttaggaccggccacaccagtgagtgagtctcttaacctttcttaagcctctctctggctaagctcaactcccttggggagactctaggggatgccacctgggagggcattgtggtggagggggtgacactccaaggagtcttcttggggaaggagctgagtgagaggtggtcctcatgcacctcatgcagaagatacctttagggaaagagaatggctatccctggagacagggattgagcagcaactgaattcatagacaatttttggaagcctgataaatgccaatgctaaagatgtcaaacaggaagaaaaaaattttgtttaaaacaaaggttattgcattatatttaaggacagatgctgcttttattttaggaaactcaaggatgatggctgtaataggagtatgtttattttagttaggttccctgggcaaagcctacatgggtggggataattttttatatttctacaggtcaacgaggagaaaagagttaatgagggcaggaagagggaaaagaggagatgtgagaaagattgagcaagtggagaaagcccaagaagaggccaggaggtgagagtctcaggagagaaagtgggccattgagaagtccctgagtcaggggtagctaaggaatgctgctgggtcagtaagaaccaacctttgacgtattgtttcctgcaactatatcatctccttgctttcactgtaaaccttaagtgaatgcttgctaccgcaaatgagcatcgtgttactaacattatcaggatttcatgaaggaaggggttggtgtttggcttaggtgagcttcccccagaaggagatgctgtaacatgcgtttcagtgaagtagatcatctgggatttggggagcacctataagggagcatagaagtgagataaagggaagaaaacgattcaatatgagttcatgaacaggttacctctgtgaacaactagggctcagtctccctggaactctctgcaaggctgtgtagaacaagactcagaattatccctggggcaggaaacggagggcgataactacttaaagtctaggtctcattgctttttagaatgagggcaattactgatgctctgatgggtgccttggagcaactttgtgagcaaatgtgcaaagagtaaatgttgctggggcctaaagatgagcaaggtgaatgcatccttttcctgtataccccactggcagacaatcatgggctgagctttcctgtttgtctccctaagccagctcccacctctgatctttcaaccattggacagaaacatagcaacaggaaggaggaatatagcaataagaatttgttctaattcttctctctcaagaagtattttccataagatagaacgctattgacatttttagacttttatttattggattaatctctgatttatcattcagtgtacttttctgtctgctatggaaatgatgaatgatgtcataattataattttaaacacttcaaaaaacatctcaaaaaatccacctttcctctccatcgcaaacaacattctagtttttgtacattccttttagctctagcactgtggataaattttacataatattaattatggcctgcaaggaattttatattctgctttcatcaattatcttttatcatttagatttaatttatattttcttcagtctttatagataatgtttgaatagcaacaaagtatttcatccagcggctggacaataatacatttcactagtcccccatttctagaaatggatgattatcccagattgggttccaaaggaagtgggctccaaaacagacacttgcagggagatctattacagcgtgctcttgaggatcaatacctgtggaagtcaggtacagacagcacagggcaagagggaagttgatctctcatgcagttattatgaaggtgttagctcagcccaggaagagctttgaagcagggagggtcttgcgaaattgtgtcaagtttgggcaagcagacagggccttaacaccatcacattgattagtcactggatatgggctataacctcaggcaaggcagttttcttcaggccaggaaatttccaaagaggtagatagctgagggctgtcttacaggtccctcagagcaatgtgggtagtgcatcagtgcccagcccaagggcattttccagtttttctaattaaatatcacagcgatgagcaactttggacagaatgtattttccactacttctttctggagattctggacaaaattcaaaagttgaaacttatgtgtttccagctctgggaattttgcctctaaaatattttctgacactgacacagttgctcaagctcttttgtttccctgatttctaaaatggtgacaccaactccagctaattaaaaatatagtgggaagaaaagtaacatcatatgtgtgaggcattttgaatattacaaatgtttttctcaaacttacattggataatggttgtaaaatacagattctcaggttcattccctagatattccaactgacaacatttcagggggcctagaaacctgtattatgaaacaatataccacacaattcttatccctgggaaaactgagaattgctgctttagaatataaaacttgatgaatccagcatatttgggtattactctgctgctcttttagaaggaaaacaatttgcatcctgtctcctttgcctgcacccttcatcaagtccactctagtttcagcacactcttttgttatcctgtcacttaaccatcttcttgaaataattacagtccaaactacaaatgtattttcacatgagctcttaagtaaacatcccccacttatgactccctgctggacattcactgagacccgaaattgtggaggccactgtgtcaggcattttctatacatgatgccatttaattcttttagcaacacctaaggtagattttatcatctctacttttccatgggaagaaaaggactgttttggaggttgaagagagtgtccaaaggctcgatgagctattaactcctccaaggtgttaggtttggcagtcactcttaaaagttgtaaagccaaactctcaaacattcctcataaactcatgggtatctgtaacagaagactttttcagttgtaagtcacacaaaacccaatccaaactggcttaagcaaaaagggaatttattggctcatgtaactaaaaactctatgagtaactggccttcagatgtggctctttgcagggggtcaaatgatgtcatcaagattttttttttgcctctcgacttgagtaactgtgtcttctccattgtttccattcccagagagactcacctcctcttgtaaagtggctgctatcaactccttccagctttatctccaatggaaaagagtcttaggcagtcatagtcacaaggtctggagaatttccatgattggagatacttcagacatgtacctaatattaactgttgcctggaaaaaagacaacttgggtcatgtgctcactccctgttcctccaaaaacttgaaaactgagtggtggaggggcaaatctccaaactaaaatttgggctgttacacaaaaaacaaagaatagatgctgaggagccaataggtaaatttctactgctatatcatcagctttttcttcactttccttttgtattgagtcttgttaaatatcctctaacagcctgcctagagaattcaagaactgttccaaagacttcatacactaacttagcaatgacttattagacacgtactgttattgtctctatacctacacacagatgaggaggcaggagcctttgttaaaggtgaaattggaacacaggccaactggctcccagatccattctttttcccaccaccgtctatggcctttaaaaatcatacgtcttcgttgtctagagtcagtgtaatgccatgggcttcacatgatctctttctgaaccactcctagatagcatccagcctcaggtctcttcccctccatctatctaacctacacatcttcctagagaatcacacccacgctctctcacccacacatcatctgtagacaccagccacatgcctcgctctactctagatacttgggagtgggaatgaggagtatgtgttcaagaagacagtcttgattcttgctcaggcagagaccatggaaaattaaacagggaattatgaaataattcacatgccttcatattttacctagggacaaagcatcaaatgaataaacacacatagttatgtactttgagtgtccttctgtcagtgttattcatatactttaagatgagctggctgagggattaagaggcagcttttatttctggtagcttatagatacaagttctcagctgcaaagttctggcttgggccccttgtgagttcttggactgcatgaaacttaaagcatgatggtttttcccagtggtcccccagatgtgctagagcatctctaaggtatatatgttaggtcttttcctaggggatcccactatggttatgagagtgaaaatatgtacagtatgtcacaaacaccagctgttaccttgcaataatggcatttctctctggagctgatcctggaagcagagaagtaacataaatcacactgggaagagccttggactaggagtcaggaggtcagcattacagctctcctattgccctatgtctgggtggtctctataaaagtctcttctcttaaaaaccacatgattacctcaataggtgcagaaaaggcctttgataaaattcaacatccttcatgtaaaaattctcagtaaactaggtactgatggaccatatctcaaaatagtaacagctatttatgacaagcccacagccaatatcatatcgaatgggcaaaagctggaagcattccctttgaaaaccggtacaagacaaggatgctccctcttgccactcctattcaacatagtattggaagttctggctaagataatcaggcaagagaaagaaataaagggtattcaaataggaagagaggaagtcaagttgtctctgtttgcagatgacgtgattttatatttagaaaccccatcatctcagcccaaaactccttgaactgataagcaacttcagcaaagtctcgggatacaaaatcagtgtgcaaaaatcacaaacattcctttacaccaacaatagaaaagcagagagccaaatcatgaatgaactcccattcacaattgctacaaaaagaataaaatacctagcaatacaacaaacaagggatgtgaaggacctcttcaaggagaactacaaaccactgctcaaggaaataagagagggcataggaacaaatggaaaacattccatcctcataaataggaagaaacaatatcgtgaaaatgaccatactgcccaaagtaatttatagatccaatgcaattcccatcaactacctttgacattctcaacagaattagaaaaaacaattttaaatttcgtatggaaccaaagaagatcccgtatagccaagataatcctaagcaaaaagaacaaagctggaggcatcatactacctcacttcaaactatactacaaggctacagtaaccaaaacagcatggtactagtaccaaaacagacatatagagcaatggagcagaagagagacctcagaaataacaccacacgtctacaaccatctgatcttcgacaaacctgacaaaacacgcaatggggaaaggatctcctattcagtaaatggtgctgggaaaactggcttgccatatggagaaaacaaactggatcccttccttacaccttatacaaaaattaactcaagatggattaaagccttaaatgtaaaacccaaaatcataaaaaccctagaagaaaacctgggcaatatcatcgaggacataggcatgagcaaggacttcatgacaaaaatgacaaaagaaattgcaacaaaagccaaaattgacaaatgggatctaattaaactaaagagcttctgcacagcaaaagaaactatcatcagagtgagtaggcatcctacagaatgggagaaagtttttgcaatctgcccatctgacaaaggtctaatacccagaatctgcaaggaacttaaacttatttataagaaaaaaacaaaaaaccccatcaaaaattgggcaaaggatatgaacagacacttctcaaaagacaacatttatgtggccaacaaatatatgaaaaaagttcaacatcactgatcatcagagaaatgcaaatcaaaaccacaatgagatacccatctcacaccagtcagaatggcgattattacaaagtcaggaaacaacagatgctggcaaggctgtggagaaacagtaacacttttacgctgttggtgggaatgtaaattagttcaaccattgtagaagacagtagggcaattcctcaataacctagaaccagaaataccatttgacccagcaatcccattactgggcatatacccaaaagaatatatatcattcttctataatgacacatgcacacatatgtttattgcaatgctatttacaatagcaaagacatggaaacaaaccaaatgctcatcaatgatagactggataaagaaaatgtggtacgtatacaccatggaatactatgcagccataaaaaggaatgagatcatgtcctttgcagggacatggataaagctggaaaccatcatcctcagcaaactaaaacaggaacagaaaaccaaacaccgcatgttctcactcataagtgggggctgaacattgagaactcatgggcacagagaggggaacaacacacaccagggcctgttgtggggaagggggttggaagagggaacttagaggacaggtcagtaggtgcagcaaaccaccatggtacgtgtatatctttgtaacaaacctgcacattctgcacatgtatcccatttttttagaagaaataaagaaaaaaattcttcaattaaaaaaatctgtgattaatatgaaaaaaaactcttgtcttttctacatctcaggcctcccttttgcagagtgaagggattgaaatagataaacatgaagtgatattacccactgtgccaagattggaggacaaagaggcactggagaacattttctaggttcttagacaagttgtattctgatcagggcgtggaaagttatgacagaattttgttaggaatgtgcatagaaagacatcaggacaggtgccaaatctaggaaccaggtgttcagaacagactcaactatccatgtctcaggactgatcagggatgagaggacattagagagaccatatgatggcatcgaagtgtggccagaagccatatgcgtcttcatgagcctgcatctcagggttaattcttccaagtcctgcccttagtctgcttcctactaaggactcttcctcctcctttctctttcttggaatagtcccaggactttattgtctcacgagacagagactttgccttcttcatagctttgccacaggcagttgatcaaattgcatggatggggaattctggtccttattagaaaaacagagaacttctcccagatgtgacaaatgttacacacacttgctctcattccttctccctgtgtctataaaaacatcactaaccaattactgcttctttccccttgggcttgggcatagctttagggtcttcagcacagtcttccaaacagctagtaccaatccactaaagatggcacttaagatgaaactgattgctcaaactagcctccaggttgtctcatcgatagttcttttgagaatataaccttagtatcctcccatggtaagtggcaacgtggtttgaagcttaattttcagataaataatgaaataataggagctgtaaagacagatagagatagacagaaaagttttaggtacactgcctacagaagagttgggtaactgagcctatttaaggctggaactctgggtcatagactgtgagcataggcagctgagcagatgtggccagggggttccccatttgtatctgtctgggcttagtacaaatggacttccacatgtctcctagagtgtctggtgtctcctagagtatcgtttcaacttgttggctttcattcagattggattttaggtacagacaggatcgtgtctacccatcctatcattattatattctaccagtctattaagaattgataagtaatgggctggtcctgtttccagcccacttcaatcatgtcttagtaatgggggtttccaaggaaagaattacaattgagtaagcacgtgacctccacattcatatttaatcagatgccagaggaccttgggcagatctcaggttgccaggggttctacaagaaactgtagggtcttgactcttaaagggacaagtttcgtcctttgttggaaatacaataataacaataaatgcaagaaaagaagatacagaagataagacattggcctgatgttttagtagagatctggcttaaggtgaaagcagtacagactgaaaactttggtgtgaagttaatcctttagtttcatgtatctttgaaataacatggaaaatgtgagcctcaacagagaaccctgagttgtcaccatggctgtattttagagtggactattaattttcctaattagagacagtgcagtgcagtagaaaaagatgtagggtctgacatacctggattttaaacttaactccatcccttacaatctatcaacttggaacatgaacttactcctcctaaccttcagttttctatctacagaaaatggagcaaattgtaattgtttgtactgtttaaatggcatttctctaggaagatggaagaaccacagtattatatatgagcgtatagagatctgtccataggcatcaggcacttttaggtcacctgtctttagccctgttagaacagcatcttagaccagcaaaatcccagacactgttcccacctgggagtctcacttattcccccttgtgaagggtaattgtgcttgtacagccggttcagcctttttctatttagccagcactcaagtctcaccagtgattctcaggaggccagcaatgaatattgtttaaatagaaaatgttgtttgtgcatgcagtgtcaatgaagatgttattaatacagctccaggaaagcagctgctgccaaccggctggagaagccacagccccatacagagcctgtcccacaatttcagggctgagaggcacttaaaaggcatcaggtctaacctctgtcctatgaccatctgacctagataggctccagcagttccaagggaaggacacctaccaaccatcttaacccataatgtggtttttccatctctggataaatctgttcattacaacttttgtgtttgttttccagcattggcctcaaatttgctttttaagaatattctctcattgatgataattcagatccttgtgactacacggtacaaataaaatatcccttccttgtgacagttgtggcttcagggaggtgtctctacttgcaggttaagccttcccagttttcccaaggatccttcagatatcgtggctactgacctctattgcgtcagacccatgtcccagctccaccttggactagctggctgtgcagtcttaggcaagcatccttatctcacccaaaccccagtttcctcatgtgtgaagcaagaaacacgcatgggtatacatttacttaaaatagtatggggcttgagggatgtgaaatttaaatgagaacagttataatatgcttgacacagtgcctggcacatagtaggcactcagtaattatgagtgatcattattgttgttttatcattcagcttggagcacagtaccctaggtgcgctctaattaacccataattgatcagaacaattaggtttcatcagagcctataaaactattaaatgagctaggtcctacttacttttccactctcacctctcacttgtcattttctgtgttggccataccccatctgcattggtctccttccatttctttgcataagccagaatctgtcatatcttgaggtcttcacacatgctgtcctctcctcggggcatgctttctctttccatctggatgcacacacttttcacgatttccctcttttcaaggtcatctagtttttcaaaacgttacttcccaaaagaaactttccttgatcactcatctaaacagccttccccaatacatctttcacactattccctgtctttgctgctcataacattcaccaaaatatgcaattatatattgacctgtgtgttcaccttctataatgtttatctttgctgctagacttagaacatcaacacagggaaacagtcttttttgttttttaaaaactgtttttctctacatgttataatggtaaatggtaaacatatagaacagttgaaaggattgtaaggcaaactcttatgtacatattccctgtattaaacaactaacactttgctgtattatctttattgcacatttattcatctatccatccctctttctgtctgttcatccattcattcttttatcttatttcctaatgcatttcaaactgagttgaagacataagtacacttcacccctaagcacttcagcatgtatatcattattaaccagggatcaatattcatttatgattcttctttcttgggttaaaatggacatgtagtaaaatgcacaagcgttaagtgtacaatttggtgagttttgaaaacacatacacctgtctaacccaaacccctatcaagatggaaaacattattgtcactccaatgcgttttcttatgccctttcttagtgaaactccaactccactgaccccagaggcaactactgttttgatgtttttcaacatcgatttgtttttccttttctaaaattgtatataaatggaattatagaacatgcattccttttttgtaaaacttctttcactcaacatagtatttttgagattcttccaagtctcagcatatatcaatagatcattccttttattgctgagtagtgttccattgtatggatataccacagtttgtttatttgttcctctgttgatgcatccctaggctattttctatttttggctattatagataaagagattatgagcattctgtgacattctgttacattcatttatcttgttttttggctaccatgaataaagaggccatgagcattatattacatattagtatattcttttatcttatgtaaatacctaggagtggaatgtgggtcatagggtaggtataaacttatttttataaaaagctgctggacctttcttcaacataggtgtagaaagagtctgttttctttagtaacatcaaccagatagtatgtgaatttggcacaaagtaagtgcttaataaatatttgttaaattaatacacagagaaaataaatagaaatatagtgactgttctaatcctttcctactgtttactagtgaagtgtgactgtttacgaatcatttaagttccatgagccttcaatatccttttatgtgggaataataaaatgtgccttagatgcctgaaaaggttagtgctgaagggccaggggcatggggggagattttaggaggtgagggacaccattcatttaatacaagcgtgcccttccttctctccctgacctccccagtctgcaagatttcggcctgcagctgtcagggaatatgccaaagcctaggcccaggaggggtcagggtaggtgaaaggggaagaggcacttggatcaaccattggttgctctcaaatgtctaaagttggcatttatatacttgacttctctcacagtttctctccttcagatttaacgtctaggtttctctgattttaaaactgggttatttgaatgtcaaactttcgataaccctttaatagaggtgtccattaacctgtgctaaattagagcccagcgtccctggaaatacatgtgacacccacatgaataccaaatgccttcattaggcacagcacttacatgatgaataccaaatgcagagcccaacgcagggacacagatttcgcttcgaggacttgccaacacatctttgcgtttcctcagcggtaccggtcagccctgtttgctgtttatttccaggtgatgagatgtggcaattgtggcattggctgaaataaataaatggcatcctaatcaccaagttcagagatggagcagcaaaggaggctatagctgatcactcaggagtcagcaaaaggatgcccacttagtatgcaagacgacttccaaacacttcataaaaggcgataactttctttgaccaaagaatatattatttataagtgattccaatgccttcttctctccctccttcactgccatcctcctgccccccattttcactgtatgttgtagcacttgttcagtgatgaagcccctcgtaataaataatttataaagcaatttacaagtacattattcttagcaataagataagacctggaagaaagtgttttactgatacacacacacacacacacacacgccccttggcttataagtagcaagctatcagaacaccaataactaaggtccatgggcttggggtgaagggtgttataagccatagtgctggagcccttatacataagccatgtaaagtgtctgaagtgtatttgcataataaataagagaaaactcactaaaaacagccttttctcttaatccttgtacacagctgccatggctttgtccacatggcgtgatactaagtgaagacaattttcccttaatggctaacttctcttgagtacatccattgagccaggcccagtgttaagagttctcaataaattgtcttattttatcttccctatctctatgagatatgttttattagtattcctgttactggacaaagtaacagaggctgcctcccagtcttcaacattcagtctttgaattcccaatccagttaaagtcactcactcaagtattcattcaatgctaatatcctacaggcatttgataagcatctgtcattctttattctgggagctaggatgcatagacagatgatgcatctatagcagtactgcctaatagaaatacaatgtaaatcacaaaggcaagctgcatataaaatttcaactttccttttttaaaaaaaattagttttttggttaaattaaatttaaccaaaaatttggttttggtctgttgcacaggctgcggtgcagtggcaccttcatagcctcaaactcttgggctcaagtcatcctccaccttaagctcccaagtagctgagactacaggcgtgtgccaccttcctggcaatatatgtatgtgtgtgtgtgtatatatatatatatatatatatatatatatatatatatatatatagagagagagagagagagagagagagagagagagagagagagagagagagatagatagatatgggggtttcttttgttgtccaggctggtctcaaactcctggcttcaagcaatccttccaccttggtctcccaaagtactggggctataggcatatgtcaccacatctggatatttttttattctttatttttatttattttattttatttctttatttttgagacagagtctctctctgttgctgaggctggagtgcagtggtgtgatctcagctcactgcaaccactgcctccaaggttcaggcgattctcatgtctcaccctcccaagtagctgggaccacacccatgaaccaccatgcccagctagtttttgtatttttagtagaggcagggcttcaccatgttggccaggctggtctcaaactcctggcctcaagtgatctgcctgccttggcctcctaaagtgctgggattacaggcgtgagccactgcgcctggccagtatgtatactgtttttgttagagatggggtctcactttgttgctcaagctggtctaaaactcctggcttcaagtgatcctcctacctcagtctcccaaagtgataggattacagttgtgaaccaccatgcctggttataatttcaaaatttctggtagtcaccttattaaaaaaaggtaaagaaaaggttcaaattaattttaatggtataatttatttcatcaaatatatcttacattcttctttcaacatgtactcaataaaaacattattgatgagatactttaaattccttttcatcctgtcttcaaaatccagtgtgtatttttcaccctgtcttctaaatccagtgggtatttttcacttatgacatatctgaagtcagactagccacatttcagggactcaatatccacctgtagctagtggctactgaactagatggcccaggtttataggaaagcgaaggaggcagatgcctgggatgacatatcactagactatgacaattgcgattagagaaatcagcttaagctggggacaaaggtaatgaaaaaggccactcaaagactaggaaggaggaatccacctgaaaaagagtagaccaggctggggttcaggttggaaagcttgggccaaaagaccagcattctcctaacttcagtcattccctcactcccctagcaaaagttatttgctttctctgcttagtatttgtcctcctgtttacttacttttttttttttttttttttggtaaattgatttactttttaaacttaaacaaatttatttaacaatgggactttttggtacttccgttaatgggaaagcaaaattgactgttataaataaattagccacaaaacaaataccaagcaaacaaagcaaagttattgaattctagccatatttacttgcctgtgcaaagctttgggtttctgctttatcttgtttttgtttgaagagaaagaggagagagaatctctgttttgggcttagatgtattaagggctgcatttattctttctactaaaacaacccccataaaacccaaacaaaatatatgaagtaatggtttaaaagacatggaaaagcaataacaaaagcctaatccctggtggtaacaaacaagaccaggcttacaattctagcttcctgtctagtgaataatcagccctatagtaagtactactctaatcgtaactaacaatagaatcaaaacccaataggactaaattgttttcaagaaatttaactacattccagaacaaagataaagaatatttatgaaaatattttttaaaattaccaggctatagtgcagagaaagggaatccaagtggagcctgacaggcccctgaagccaaggaaacagatctgagagatccatgcagatgaaggcagctggtattggcagaacagagtactggggaggcaaaagctgcagagagtgagagaacattgaatatctgcagagggcttctgtcaagctttcagctaacagggattactacatgtgcttgtgaagaggacttagagttaggagtgtcctgtgctcacacagtgttgggaataatgcctgctccaaccagtaagactggaaaacctcatgattcatggggcattaggtaaagtacccaaaagggtcttgcctcagtagtggggaataattagccctataatgactactgctttgattctacctaacacttcttagaagcaagacccaaacggaccaaattgtttccaagtaacttaactgtatctcagaacaaaactaaagaatatttatacccaacaaggtaaaagtgacaacgctatacattaaatcagagattaccacaaatgcaaagtgcaaaataagatccatgattaggagaaaatcaatcaactgaaactgtaccagaactgatacatgttaaaataagcgtaaacattaaaacagttatgataattgtattccatatgttttcaaagataagtagaggcatggaagattttaaaaaagtgaaccaaattggagttctatagataacaactataatttaggaattgaaattatactggatgagattaatagtagattagatattgcagaagaaaattttagcgagcatttacacatagcaatagaaactatccaaagtgaaacatacagagagaaaataattaaattctaaaattatcagtgagctgtgagacaacttcaagtagcctactccagacatgtgaagaggaaggcgtgtttctcaactgattctatgaggccagcattattctgatatcaaaactagacaaagacattacaagaaaaactacacaccaatctccctcataaatatagattttaaaattatcaacaaaattttatctaactgaattgaactctctctctctctctatatataaatagttggagggagatatatacacacattaaatttatattggatatactatatctaactatatacatatttatttaatagatatagtatatccaatataaatagttggctatactatatccaattttacacacacacacacacacacacacagacatatatatatatatatatacacacacacacagaagtccaagaggagtttatcccagaaatgtaacattggtttaaaatttgaaagccaacctctgcaattcgctatattaacaaactaagacagagaaaagtcatatgatcatctcaatagacataaaaaatatttgacaaaatgcaatggtcatccttgttaaaaactcttagcaaactggaaatagaagagaaattccaagacctaataaacaacatctattcaaaatctacaggtgacatcatatttaatggtacaagactgaatgttttttgctgagagctggagcaaggcaaagacgtttgctctcccccttttttcagcattagcttagaggttcttgtcttgacaactaggcgagaaagagaaaatgcatccaaattggagagggagaatcaaaactatcattatttgcagattacttaatcctaaggaacccacaaaaatactagaactcataaacaagttcagcaaagtttcaggaaacaagtcaatatataaaaataaattttatttaatataaaactgttaagcttatggaaaaaataaaggaatatctgcatgaccctggattagtcaaatatttcatagatatgacatcaagtacatgatgtatagagcatattgacaaattagactttatgaaaataaaaaaaaacttctctccaaaaaacactgttaatatagaatcaacaaataagccacagactggaaaaaataagtttgcaaatgactaaggatgttaagcaccttttcatgagcttacttcccatccatatatcttctttaataaagggtctgttcaaatatggctctcttttttactaagctgtttgtttttcccctccttttattttcctttccctcttcctcctccttcttcttctcttcctcattattatttctttattatatattctagataaatttcattatcagttatattatttgcaaacttggctgggcggggtggttcacgcctgtaaccccagcactttgggaggctgaggtgggtggatcatgagttcaggcgttcaagatcagcctggccaacatagtgaaaacctctctctactaaaactacaaaaaattagccgggcgtggtggcaggcgcctgtaatcccagctactcgggaggctgagacaggataattgcttgaatctgggaggcagaggttgcagtcagccgagatcataccactgcattccagcctgggtgacagtgcgagactctgtccccctgccaaaaaaaaaaaaaaaaaaaaaaagagaaaattgcaaattaaaaccacagtaccactacacttttattaaatggctaacctgaaaattaccctatcaagagttggtgagaacacagaggtactggaactctcatacaccactagtagtggtgtaaattggtacaacccctttagaaaatggtttggcaatttcttaaaaagttaaaaatatgttatcatatgatccagccgtttcactcctaaacattttcccatgggaaataaaatcttaagtctttacaaaggtgtgtacacaaatgttgacataagcttaacttgtaaccaccaaaaataagaaataatctaaaagcccatcaagagacaaataaacaaagtgataaattaatataatggcatactactcattaataacaaggaataaacttgatacatgtgacaacaaccatgaatgccaaagtaattgtactggatgaaagaagccagccctccccctcagacaaaacaaacaaaagaggccaggcgctgtggcttatgcctgtaatcccagcacttagggaggccaaggcgggtagatcacttgaggtaaggagttcgagaacagcctgggcaacatggcaaaagcctgtctgtacaaaaatacaaaaaagtatacaaaaaatcagctgggcatggtggcacatgcctgtggtcccagctaatcgggaggctgaggcaggaggtggaggttccagtgagctgtggttgtgccattgcactccagcccgggtgacagagtgagacgctctctcaaaaacaacaacaacaataaacataagaaagtgatttggctgtaacatgcatgcaagggaaggatcaggaagaatggactcacaaagtattttgggggcttggctaaaatgtttttactcaattttggcataagttaggttagcagatgatatggttttgctgtgtctctacttaaatcttatcttgaattgtacttcccataatgcccatgtgtcatggacagtaattgaattatgggggtggtttcccccatcatgctgttctcgtgatagtgagtgagtctcatgagatctgatgattttataagtgtctgcatttcccctgcttgcactcactcagtcctgctaccctgtgaagaagaggcctgctttttctttgccttccaccatgattataagtttcctgagacctccccagccatgcagaactgtgactcaattaaacctcttttctttataaattaacagtcttgggtatttcttcatggaagtgtgaaaattgactaatatagcatattagctcaaatattagtttatgttcaaaagttttgatgtcatgttgggagcaactggaacttgggcaagttaaccttttcgaacatcctttccctcattactttaggcaaatgctaacatggaaatattagcatttgcctaaggtaatgatttgaaagcttaaatttgagaacatgagtcatttctcattctttcactttcctcatagcacataacatgatttgaaattattgtactttagttttagtttgatagtgctgatctccactccttaccttcccatcaccaagagtagaggtcttgacggctgttttcatggttttatctatagcacttgatacagcattggacacctaggagatcctcagccaaagaaagattaagaaactcagggagcataacactacatctgaaacacttagatgatcagcattttaaaaaaatgtctatttaggttcttagaacaaggctatggcatcaaatatatgaattggcttttctaccaagttcttgccaactgatcagatgatgaggaaagcacatgtggccagtagtctaactctgagttctcccaaagttcactgtttcaatcaaggtcaaataaactttttctgccttgggccaggttgagtcatgatagctttaaggaaagaagcaagtaaataaaatgttctgtctgatctgcctggatgaaccacagtcttggcaccaggacctgaccccctggaagggtcagcagacaatggcacagaagagattgttaataataaattataaacatggctgcagctaccatggggagaccctatatcccctccccagcccacacattcactccctggcctgttctgccccatgggcttaatccacatcagagtgaaacaaatccaataaaacgtttccctgagctaagagggagttcaatgattcattctcattcattctctctcttcctgccaaacatctaatcctagatgacgaaagaacaaaggaagaggcatttcaaagaagtcatcctcatgtgtctccctgctgctttggtgtctcacaagaatcaagaccctgccctgaggcttaccaggacttagcagtaaatgtcatttggatatggtgccattagtgtcctctcaatgataggacacgaatgtggcaccttgtcatacctctttgctgcagtctcactcactggggactaccatactgctggcaaagaggatattatcagagatggtatgtggggacagacatagtctctggcataagttggcagcacaattgctgaagatctcaagtggtgacctgggaaatagtgtcttagtggaaggaacactcttgcagtgccatgatttacatgttgtaaaaatgtcaagggaatgattctacacagatggtagaaagggaaaaaatcttcccagtaggtggagattgaagcagttggcattaattcctagggctctcattgcaaaacgcctcagactaggtggcttaaacaacataaatttatttcctcacagttttggaggccagaagtccaagatcaaggtgtggtattgacaggtttattttttttctgagacatctcctcttggcttacagaccccccccttctgtgtcctcacatggtttttcctccatgtgcacattcctgttatctctctacacgtctaaatgtcttcttcttataaagacatcagtcattttggatttgagttcaccctaaatactctattgtaacttaattaccttgttaaagaccttatctccaaatatgacagcattctgaggaacttttggctgggacttcaacatatgaattttgtgggaacacaatttagcccataacatgattatccaatagtttactttgtgtggaaagagaagtatcccaaggtgagactatatcttgattctgaggctgtggtcgatggcttggccatgtggtcagcagcctagaaggaaaaagactggaagattggggcaagaaagtcagaggtagaagtacatggatagacatgtgggaatagcaggaaagggaataacatttgtttcattcctcatctcactagaaaatgttactgtgaaagaggcactgaacaaccaagtagacagaatgactcagtgacattaggtagctttcatcgtgagccaccccaggactgatacaatgagcacatgggcagagtggccatagtgcagagatggaggctactatgggcccaatggcatgggctttcactttttccagccaattcaaatgctgctgtccctggatagttagcatgttcgcaatagtaatcaacaataagcacctaatatggcactatttcttggagagtccaaccagtcatttggtagcaagtccacctcaagtggcttcttgcaccttggaaaggtcagccaatagtccttgtggggacagacacctactctgaatatgagtttgcctttcctgcctgcagagcttgagccagcaccactctgcaggggcagagtatgtaatggctgatccaaaggcatggaattccatgcaacacggcatccacacagcattatgaagagaccaacttctcatggtgaagagggtgttggaatggattcttgttcttgtaatctatgaatttaagtggaattctcctagaattgttcagcagtatgagatccttgtgacctaagcctcccttcttcctacaatctttcataggtatcagaccagcattacagtctgaaagctctttccaccttccctaacccactctcctttactactgataaagctgttgcatttctagtcctatattggtacttgcttctctgaagactggagcaaatacaaattccttctcaaggaaacgattctccttccctcttgcctataatattggtcagctttcatgggtgaattcattctatgtccttctaccaccccatataatcctactaacaagttctaatttaactatgactgtgtgaaatgtattaggagagttttttcaccttttctttagaaaacaataaaataaaatgaaatattggctcaaatcacttaatcacttaataaaatcacagaactcttccgttaatgcattatgcataattatatttgaactttctgccttaggaggaaattaaaatttgtactaatggaaacattcaaattatttttaaaacttacctttgcaatagtggtagttagagatttagccattaatcttccatggcattgtatttgaaggattttgtcatgttatgcgacttgaatttcagtgacgtctaatctgattttaccatctaggaaaaccagaatatgaaaatttttattaatttaacattttatgttttaaatatatttcacttttaggacaatatatacccagaagtatcaaacatcaatctatggattcataaaacttgtgtataattgctttatttactatacttacaaattttcaattaatttaaatttagccaacctccatattttgagggtttccaaaataaagtattttgcccaagtcatcatagcaaacaattgacttattttttctaatttaaaaataactcctgattttccttaaattactttgtaaatatttccaatactacagacaataacaaatcaaagaaataaacaaataataaaattaagcatttatttaaaaaaaatccttgaaagcatgcattctctaatgtttacatttttaaagcaacttttgaagcttccagagaattgtgaggttcttggggacagaggctgggtcattcctcttgtgtttctgtgatccctagaaaggcagtaggcaggtagttagttttcaataactgtttcctgtttctgtcagatgctccccatccctctttgagaaaaatcttgctctaaggagcaaggacaatagagatggacctgtgtttcctgtatgggtcttgcacaaagagggaatgagaagaattttaaagtacttgctgaaaaaggctccaagcttttgatttttcaaaatttttactgctccggagctaaagcacaatattcagaaaatcataatgcctgcttcactatatttgcctgtgaagtccccatttgatcaaaataatgctagacagtttctctcttgatctgtttagaatcaagataaggtcaggtgttaattaatgttgaattaccaaaaattcccatggaaatgcatatgacatctacattataaccataattagctaattaaccaatcaattataatgattaatgtgatcataatgaatgtatggcaaatggttattaattcttagagtttccaaagtaaatgcattaatcacagttgaacctgtggtaaaatgtgggtgcctaattatctttctgaactctgggtgtgatataataattttcatctgcttagaacttttgccacacattgtcttattattttcctcacaacaaacttgtgaagcagttgaaggaaagttgtacttttattgttgttgtttccatttcacaggtggttaaactaaattttagaggggcaggtgattttcccaatatctcatatcttcatatttcttccttcaaatagatcttccaatgatcttagttgatacttggagttctaagcttgaacatttagacaaggctttccccataccttcccagatgttctgctacataatactatgtggtgtttacttagaaaactagtcaacttgtcatcatattacagatataagggagaagagtatttcaccttaccactgagggagagaaattgtgagtcatctacaaaagaaaagggactttgggagctggggttctggtgcaactactgtgtcgttgtatgtgagaggtggagggcatgtgtgtaaagaaccattgcataattttttgggaattttcctctagtacaaatctcatagcactgagcacagttccaagtacacagcagcaatgaacaaatgtgcttgctgaattaaagatacttaactggaagaggagctgaaaacaaaaccaactaaccaaccaaaacaaaacactgaagggtctttggaatcagataccaagccttagaatgaaaagaagacccttagagctttacattcatttattctctgattttccctggggaaattgtgtgactttggaatacgtgatcactatatatatatatggagcaagtcaacaaaggaatgctgtaggagataaacctggagcttgctccagcgtaaggcttggaatgggatgaggaagatggaggacattctaggtcagagcaaacacatctatccagggcagaagtgggagcaaaaacactaaggagaaaggccttgcagaggtcaggatagtgccaggaagaagaggagacatgaaggggcaggtgaccatttgagggagagtccatcatggaagaacttgaataccaaagaaggagtggaggcagcacatggtagaagaaaatcctagaatagcttcagctaggggtcacttttaatagcactatacaggaaatgctttcacattaaaaggttttggggtagtggatgaactttttgaggtcttgctctacttcaaagccaattactcttaaacacttcagaggcattttgaaactgactctgaacctggcacatatgttaatgaggattttggtaagtgacatcagcagtttcattccagtgagaggggctacccagaggatgatcagcaagtcaggatgatgcccatgttcacctgtgccctgcctgactagggagggcagctcttgccaactgaagggctggaggttaatatcagaatgtttataggtatacttacatgagcccacagttaaattctatgttgctttggaggaaattctattctgtggtttattcatttttaactaattatcaagttgtagtcataaacactaaagttaatattttctaaaatattatgtatattaatttactgtacagttcattcctcacatatttattcagtgatgttatcgtctgaatgcttgtgcctctccaaaatgtgtatgttcaaacctaacccagaaggtgatagtattaagaggtggtgcttttgaggagtaattaggtcttgagggctccattctcatgagtgaaattagtgcccttagaaaagggcttgaggttacatgttagccctttctaccatgtgaggagacagcaacaaggtgacatcttttgaagcagaggtcaagctttcatcagacactaaatctgctggctccttgattttggacttcctagcctgtagaactataagagataaatttctattgtttatgaattagctagtctaaggtattttcttagagcaggaggaagggactaagatgggtacttactaatctataatggaccccaggaagacaaagataagtacaatgtatttttccctctaggaactcttagtttagcaggacaggaggacatgcctgtggataagtgccttttgaaactggttccacctgacaactgcagtcctggctaaagtgagcagagtgtgtggaacagaagccatgccccttatggaccaggcttaactaggctgattcaaatctatgtgctttagattatgtaggtgagcatgctgggagaattttaccaacagttcttcctatttttgatgctatccagaaagttctgtcactatttggaaaatagaattttgtgtagtagttaagaatataaacactgaagtcaaaagaatctatgcttatgttgtgtataaaatgcacagaaaagtgcctggatcttggaatcttagtctggatatctccaatacagaacatgagacaaggttccaatgctaatgttttatgggaaggtgtaaatccaaggcagtgagagtgaaggaaaaataaagtggggctgggaaagatgaaagcaaatacctacgtgattattgtaccaggctttcatgaagagttggaaccatacattcagccatgcaggagatctgtttagaagcaactatgcttcagaataatcccaaacacccatgcttcagagaaatgcatgcagagggacttgttctgccagatcccttccttctcttgtcatctgtcaatgaaagtgctcagcttggtctaagaaatgtcaagttttgaggtggtgttgtgggagcaatagtactgctgagagagttgctggactggactggtcctagaaacatctgctatagcatcagtgtgctgcctggctccagcttggagtatcttgttttcgctgatgcctggttttgattaaaggcacatgttgtgttcaaaggcccctgctcagctcagcctctgtgtgcccttatgtaattagtttgtttaaactgtgtctctgattatgtcaggtcttgactgtggccctaagtacaagagtgtaataagatatacctattaaacagatgttggactttaatggatatgttttgaacagtcaattggaattaaactttcaataactactgtagaacaagaaaatctatctctttacattaaacaaagcaatgtggcctcttactggttctctgaagcagtgattttcccagatgggctgtggccagaatcaatgagagaaacttttacaattcagatttttgggtcctcaattgccaagtattttgatttgtggctctagggtgaaatgtaggcagctgaatttttaaatcgtcctaagcatagagacaatcagagacggtaatttatagacagacgtagtcatttttcaaaaatcaatttttgttactatagatcaagtatttcattcacccatttattctacatcaattgatcaattcattcccttatttctgcatttattccccattagtttaatattccctgattacctggtaagcataagttgctggactagactccatccagatacaaaagatgtctacctaagtaagacatgcttctgctctagaaagtgtttatcatttagctaagagtggagagtccaaatatctattcagcacctggtctgtttcacgcatgagctacttgcttttccatttgatatcttatgatagccctagggaggagatcgtattatctccattttacagatgaggatactgagttcagatagtttaagtaaactgcccactcttactctgtttgtaaatgctagagatgaggagataaaatgtgtgtaaagaaaataagcacatcaaaagggagaaatcaattatcttatgagtcagtccagataaggggtacagagggttagtaaaagaagaagttactttcagcccaaccgggtaaagacaactgcctaagcttagaagaacaaagtgaaggacatttcaggcaaagtgggcatttgagccaggagttcccaaacttgacaggtgatttgaatcacctgggagctttaagatgattctgatttagtgactctcaggtggggccccagaatctgtattatttataagcacctgaggtgattctgaattatcagccagagttaggaataagctacttgttaacagaatgaatagaggcagaatagtattttttaagtcacatactaacattgcaacttaactctggctggaattgagtcattcaggaggaatgtgttgccctcaccttctccattagactcatcaacaagtcctgcctgtcctgtacacagcctactgctctaattctgctctcctttctccagctccattgctactatgtggtgccactcatcctgcttttgaattcactacctctaatctctgtcccttcagtagacacagcctccactcacagcagctttaactgtccttctaaaattcaactgattatactacataatggctgttacccacttaaaaaccttccacactcttcattgttaaattcttcagagtgggctttaggcttttctcaaccacatcaactccttcattcatttgttcattaatttataaaatgtacttagtgtctatgatgtgaaaacaccgtgctagacattggaaatacatgaaaagaagacacaattccttttgttaataagtttataaagtacagtaaatactgttaaggggtaaactcaaggggatgagcaacacataagaggagctgatgaccttacctgtaagagttggggaaggttttctggaggatatgatgcctgaaagacaggtaagagaaattcactgggtaaaaaaagaaaggcctttgtgaataggggcacagtaagaggaaatgtggtttgttcagacaactgtcaattgccctgcaggaatagcaggtgtggaaagagtaagtattgagaaataagcataaatgtaaacacaattctgggattgatttgggtagagtgggtgcaatgttgacatccaaatctaactgggtagattgaagtaaatgatcaaattttgtattttaaatgcaaaggctcaatatattgaactaaaactcagttatgctccaggagcggggaagggtgtggcttaacatcagcagtgcatgtgtaaaatgttcagagtggaactaatgtcagtggtatgaagtggcccctgtatggacccagtcttggaacaaaatgtccagaagtcctaggacactggtatccttgtgttcagggttagtatccacagtacaagtggcacagagaaactgaaatctccaaaggcaggttactggagaagaaaagaaatgctaagccataacacacatgagaaaatcttggaggaatcaggatggctccttctggagatctttaccagctaattatccagagtgcttccttgtggaagagaaattgacctttggaactctagggtgcagagctgagcccaaggggcaatagtcatgcataggcaaatttctggtaagtacaaggaaggactttgttaggatgacatttgttttcccaaggtgtattaaaggagaaccatacatctaagaacagataatatgctagtgcctttcttatctctactaggtttgattctctgatcaaagacagaatttttagtaaagaaagggttgtctgatttccagtggtcaggagagttaggaggatgttttagcacatgcaaactttttttctgtaaagtgctagataaaaaacaaatgaatgtggctgggatctaataaaacttagtttacaaaaacaggcagagggcagagtctggcttatggactgtacttggtcaactcctgttttggcagatggtgaggaccccaccactgagattattcaagtagaattgggggtttgcactaaaatgatcttcttaagagatgataactataaatgcaggcaatctctgcagaggacatagactagtggggccttcagaataacttagcttaattctccctctataaaaaatgaaactgaagctctacctcccccaaaaaaggatttgcccccaaatgtagaattaggtagtggtgtttgctatcctgaaagagatctctgttgctcattttacttatatctgtatattcaagagataaaaacaaacaacaacaacaacaaaacacttgttttttggtttgtaacaaggcttccaactttcctgcctttgattaaaggattttctagctggtgcctgagctttcctctgaggtgtgtgagcctgctcctctctgtagattaacatgtgcattatgaattcactgtcaatgtcagcaggctagcttttccagttttacaaacgtcttttctttcaggagctggaaacgttctcaaaactgtcctgaaagcaagtaatgctttcagtcgttgtcaccttcgtgaggaacatgctgcaacttcgctttctgacttcattctccgggtgacatttttcacgcaggctctgacagagacagcaattataaagacatccaggttggcattcaaggattcttgaagttaacaaattgtccagggataaatgacaatgaagttggcagtctacacatttcttcatgaaaatgcatgctctgggggatcagaataagcctcagaaggagatgacacccatgctcatggtggggcctgtcggagtgacccccagggcttgcatcttcaggaagctatttggcttaggtcagctggactgtaaacttctgggcagctatcaaggatcagaggaaaacaatgaaaatatgtacttaaatacaacgtagctttttgatttgctgacaatatctaagtgcaagaatggtgtttattcaaatctaattccctcttgtgtatattcaccattcattggctctcatagcccaaagtctgtcctctctgtgcagcccagccttcccaacgttccagtgttttggtctcatcccatctctcctccattcaagcatccacttttccaactgttgagaacacttcacacagtctgttccctttacttggaattgcctcacaatttcccactaagcattcagctcaaaaggcaccttttctgtgaagccttcttttcttattctcatgagaaccatctccattcatgaacagagatagaaggtgggggatatcaccagtaatgtcccagaaatcgaggaagctttaccttagaggataacagttgtatataattgagacccacaccagtttctagaaacaattccttatggtattgctgagttcatcatgaagcaggaagcccaaaagtgcaccaccaagtcttgatgggcaaaatcagtaacttcatgctaccgagtgctttgtgtgtgtgtgtgtgtggtgggggtggcaggggcgggggggactgattttaaccttgcatacatactcactttctttctttctttctttctttctttctttctttctttctttctttctttctttctttctttctttctctctctctctctttctttctatctttctttctatctttctctctctctctctttctttctatctttctttttctttctttcttttgttttctttttttgatacggagtctcgctctgtggccgggctacagtgcagtggcgcaatcttggctctctgtaatctccatctcttgggttcaagtgattctaccgcctcagcctcccaaatacctgggactacaggtgcctgccaccatgcccggctaatttttgtatttttagtagagacacggtttcaccatattggccaggatggtctcgatctcttgacctcgtgatccacccatctcggcctcccaaagtgctgggattacaggcgtgagccaccgtgcccggcccactactcacctatttcttacaacttagaatctatgatctatgatagaatctatgagatgtgctattaggcaaactccattttaccaatgaataaatggagaaatagtcttagagctgttccaaggcttacaactagtaagggtaataaacgagccaaaagaagagctcgggcagccaatgtgaagagaagttggattggatcagggtctcaaagcggaaagactgaagggatccctaagcctctgagctcatcgccacagtgcactctccctggaaatgtaaagatgtgctgaggatatgactgtgggtagccttccccagaccttctttccagggtggtggctgaagctggttggagctttttctagaaatgtcctgactcaatctctcagtcacactcctgagcacagaaaggcttgcgctgtgcctccctccagggcacctggtcctggatgtgacttggaaagaggaggacatttctgtagaccaggcagagcagagaactaggaggtggtgggaggggtaggagggtgagtgaagcggtgggcaataaagggggtggggagtgggtggggggggtccatggagcaaggatagctgcagcttagagattgtgagaatgattatcttttctccattaaggataatgacagtgagaggaggcagccaaatgcctaagcagataggggtgggtccccagtgaaaccccgccttcaagccaaaaaaacagcctgaaggctgaaagactggactgctagtcctggatgaaacctgcaacccagagcaaggacttctgttcctgtttacctgcccttctccaaatgattatgaatgatgccttttaactaatggaatgttgccttttccaatactacctatggcctgtctcacccctattctgagcccataaaaagccccagacccagctacacagaaaggagagaaccacctgactttggaggtgggcaaccactccccacccctgccccacatcccctctcctttgagagccattctgtcactcaataaaattcttcacctcccttctcatccttcaatgtccagcatatcctcattcttcatgggtgcgatacaagagctcaggaatcaccaagtgcaggtacaagctaaatacaggcaagctggggcatgccagtgtgaccaagcgaggcccaggtggggcattaccagctgggggtccctggcttgcaaagtgaccgagaagaaaattcctacagcaataacaatgacagaatttgtgagatgcttactggatttcagactctgcattttgctaggcttattgggtttattcttcatcaccattctcattctgcagatgacaggggtaaaactgagagccatggagctcaaggctgcacagctaaaggagatagggccaggattcaaacccagctccctcagcctgcagagagactcgtcctgtgctgttcagccacccagaccaggccaagggaagatgtttttccctttcagcatctttcctggtaatcagcactcatgagacctacagctgtcacaaggtatcatgaagttctattgggtgtaagaaagagttgactacatgctaactctgtcttggtaagagagctagactagccatgctactggtgagtgatacagcagtatatgttctcatcaaatatccagttcctgatacagggcctggcatcaaagagacacacgataaatgattcttgaacacattttgaaggaagtcatagcgaatgcactcagggggaccagctctgacctttctgccagtgcttccccaggctcagataacacatatttcaaattttggagaattctgataccagattccaaagggcatccatctcagattccaaagggcatccatctcctcctctggttcaaatgacactctgcctaggtctgtgaccaggtcatctcagcatctcatccacctccttccctgctccggcctggagtcctgcctgctccacccacccaccctgttaatttctagctctgaactagctcagccacttctctctctgctcctattcctggttctgtaagttctcctgaaaaacaatcacacatgtgtgctgatggttgtccttatgaatgcgtattccatctcatcaaactcctggactttgagattatttgacttgttttctttcggttatttcccgtcaaccaccacagtcagagtgtgagggtgacttgggatggggagaggagggacgtgatggaagaggtgggaaaaggttttgtatggggttgtaggtgatgttttaatgttttgcattgatgaataaaaatagttgttaccataacccccaaaacgaatggacccataactcttattttacacaatatttttcctactgtggacagattcatcatgtttgtgacacttaaaagctgttttactctggctgctaggtgggatagtgtatccccacatctctctcaaagctcacctgtgtgttctaaaacttcatctccatggcacattttgcatcctcttatctcaaggttgttgaagcagatttaagagctaccttccttcctctcagcacatggacttgcaactttatctagcggggattctcgagcttaggtgtattaacactcagatggctgagccctgccccacagagtttctgattcactaggtttggcgtggaacaagaatttgcatttctaataaattcccaggtgatgccaatgttgctggtctggggaccccattgtgagaatgactctatgacacctatccttgccttcttaacttctgtctcagataaacagttgtcctctcttcttttggcagctaacctctccagttagggacactaaccatgtctcctcaaagcatatgtagaaaattcactatggtcagggattgaactcaatctcatgcgttcagcagtaagcaaagctgactcagacactttagataagaagagaggtatcatttggatgcagatacatatgatcaattctgaattggttgaaagtgttgcttttaccaaactgatgacagtgattatctacatgatgatgaaatttatggatagatgctgaaacagttatatatatatataaaaaaaaaacaattccccaaagattgggaccactacgaagaatttgccttctttaaactaggtaccccagtagagaatgttattttccttttgcaaactgatctgcagtggtttgtggatgtcagcttgctatatgcctaatagagttgtctattcctcaattccacatcttttgcagaatatttcagtgagattcaacctcaaaaataagagtaagaaaaaaatacaggaaggttggctgagcagtgcagcacctacctatggcaactcttaaatcatttgatatttttgaagcttttgctccagtagaaaactcagacctctgagttggatggaggtgaggggagtacaaaaccaacaccaggggttccttgcagcagcccagaaagcacttgtgaatgtggcaggaaatgagatcttaagtcagtgcataaaacaatcaaatccatcacagccttggaatggcccttataactcagggactgtcaaagccctttgtgtgcacagaggcagtcgtagaaggagtgacgaactgagctcagagtctgctaaatctattctggcagccagaggaatatatttccaaagccaagtcacatcattttccttgagctcatttgactgcaggctaagaagctattgcagaaaacaaaagtatggtggaaggggtgctggaataatgaatattaatgaacttaattctctggtttggggttggcttgtactggtaagatgcaaaggcggataaagaagaacgaattgaaactggtgcttcaaaatgaacagtcttggccactcatctactgatctaatacatgtttacagtgtgcctactatttgcttgctcctgggcttggcaaagatgaaaaacaccaaccctctgtcctcagggacttcctggcctgttggagacacagatgtacatggtatcatgacaattcagggctttgctgtccattatagagaacacatacaaactggaggggaagtcagagaaggcacagcagaaggtgcaaatgcttaaacaaagcttccctctggcaggcatattgactgaccctccttgagttatgagcttgagctttggttaaagctggcactgcaaagaaacagtagctagatctcccggtttcccaggagagtcttgattatacacgtttttcctgttgccccagttgaattgtgtcttcccaaaataaacgtctgaatcttaaacccccatagttgggaatgtgatcttatttggaaatagggtcttcgcagatgtaatcaagttaagatgtggtcgtattgcattagggtggccctaaatccagtggctgatatccttataacaccaggtgaaaacacaaagatagaggcccaatcatagaggggagaaggtcatgtgaagatggaggcagaaactggagtggtgaagctacaagccaaggaatgccaaagactgcaggcaaccaccagaagctagaagaggcaaggaatcattcttccctaaagccttcagattcttccctattgacaccttgatttcagacctcttgtcatctgaactgtgagaaaataaatttctgctgttttaagccacctagcttgtagtacagcaagtcctcagataacgtcgttttgttcaatgttgttttgttaaaatgatgagaaaaacataaattcctagctggggccactttgcatgttctccccaaatctgtgtggcttttctccaggtactctggtttcctcccacttcccaacactgtgcctgttaggtgaattggcgttgtctatgtgatctcagtctgagtgagtgtatgtgcgcaagtgtaccctgcgatgtgatggtgcccttgccagggtaggtttctgccttgtgctgagagcttccaggacaggctctggccacctgtgaccttgaactaaattaagtgggttggaaaaggaatgaatacatgaacacagactattgtaaaataaaaatttgcggctgggcacggtggctcacgcctgtaatccaaacgctttgggaggccaaggcgggcagatcatctgaggtcaggagttcaagaccagcctgaccaacatgaagaaaccccatcttgtctaaaaatacaaaattagtcaggcacggtggcacatgcctgtaatcccagctatttgggaggcagaggcaggagaatcgcttgatcctgggaggaggaggttgcagtgagctgagatcatgccactgcacgccagcctgggcaacaagagcgaaattccatctaaaaaaaaatttttaacttgatgttgcagtttccaagaacctatcaacaatataatctgaagacttactgtacttttttacaacagccataggaagctattacaactctcaagtttgaattttgattcagaacatgtggtgtctgtattttagtgttccatatgatctagaataagtctgaggagataacttctagcacttttgcttccccttttctctccctgccaaactcttcctaaattcagttccggattaggaagatcacttctcactccacctggcagggtcatcttcttgactgcacctctccagtttctctctgagactggaaagacactccagagataaggcttgtcctaaccaatcagcactcagaaaacatctattgactggatttgatgtaaggtgggctctaagtaaagcctgaatttattaatcctccagaaagtttactgacctctctgagttggatgaggccagatctaataatgagtatgttccagactactaaagacaagcatatttatgactatattcacccaatttgggattgcactcttagactactgccatttacagattacattagcagatacttttggaaaacaatttggcattgtcattagtatttataaaatgtttgggttctttgactcaataattaaacttcagggaaactgtcctgaaaacaaaccaaaaattcagacaaagctgttgctacaatgatgtcaaaatgatacaagaactgaaagtaatctatatgtccaacaacagaagaataacttagtaaacaattatagtgtgttcataaaagagactattacacagctacttaaggcagtgctgttgaacgtcatgtgttaatactgaaatgctttaatatgctaagtaaaaggaagacgtttttaaaaattatatactatgatgacatcataaagtgtccgctgaaacttggctggaaggaaatatgccaaaatggtaattgtatttgtgtttgctcttatgaaatcccttgctatgtctgcgtttgaatttttctgcaatgttttcatttttgaatttttttttttgagacaggatctcactctgttgcccaggctggagtgcaaaggtgtgatcacagctcactgaagtctcaaccttctgggctcaagtgaccctcccacctcagcctccccagtaactgggactacaggtgcatgccaccacacatggctgattattattattattttttctgtagagatgggatctccctttgttactcaggctggtcttaaactcctgggctcaattgatcctcttggctccatctcccaaaacactgggatgacaggcatgagacatatttttgaaatttaaaatacaaaggaatagaccttcagattcatttatttatgtgcttaaaattgatagaaaatagcaagtcatttcagtctattcattaattaaatatcagttgctatttcatatctatgtgcaaaagaatcttgtctatttcacatgttccataggaaaattatcttcctttaaactatgacctctgagcaccaaattcagtctactgcctgtttggtaaataaaggtttattggaacacaaccacatccatttactttaggctgcattacaacagcaaagctgagtagatcttacagctctaaagcctaaaatatttaatctctggctctttacagaacatttgcctactcctgcattaaaacatttttccattctaacttcaaataactccaattggtcttttctgtcgttcctgataggaaagcctgtttgagcttttggcatgggcatctgacattagctgaatccatagaccctggccttgatatgtttaccctggcatttataatatggctcagtttggatttggtggaggacactatgcattggtgggaaattaggaatcttgttttgttttgttttgtttttgagataggtcttgctctgtcacccaggctggagtgaagtggcatgatcttggctcactgcaacctccaacttatgggctcaggtgatcctcctgcctcagcttcctgagtagccgggactacaggcatgcaccaccatgcctggctaaccttttgtatttctagtagagatgggttttcaccatgttggccaggctggtctcaaactcctgacttcaagtgatccacctgcctcagcctcccaaagtgctggggttataggcatgagccaccatgccagtctaggaatttggtttttaaagaatccttaaatcctggagtttggatctctggacacctccccctatcccaaccaaataggttctgggtaactaactcccactcccacgttaaatccactccacagcattaaaagaatggtccagagtattggtatttttgttattatccactccaaaagatacaattgaattcgattagcaatatagcaggaaggctactgctccagcgactgcttttgtcttaccccaaagcagctcaagttcattaaaatcacaattatctgactcttaattaggtgagataatttaattaacaatgcccacttaattgtcgatggcaggaaactgagacgagcaggctccatggtggctgaggcaacttagcttgaaatatagtggatggcattctgaaccagccggctcagtgagctctgtgcatgcacttggcatgtgaaagacctgagaaaagtaaacttggctctcattagaaaatctaattctgatctggaatggtgagggtgaaggatttatagcatgatggccaaaataatgatcctgaatcagctccctaaatccttgtcattcattcattcattcattcattcattcattcatacatacattcatttactcattttctatttctccacttttattccttctcttgtttcttccttctctctccaccttccaaaatctattaaaaccttatttttgttctattaagtataaagtgctttgttggataccaaaaatgggtaagaagactttttttaattttaatttttattttttatgggaagaggcccgggcagtctgaatttcaagaaaaggaatgatgatggtaactttgataaccacagtttattgagtccttatcatgcaccaggcaatatgctaaatgctttaatctcattatcttattttatgttcacaaacccctgtaagctaggtattatcatttgcattttaccaatgaggagaaactggggcttcaggtgataaaggaacatgtttagggtcatgtagccaataaaggacagaacctagatgcagcacagatacctataatgccgttgctttcaaacactagataatggttcccttgcgcagctcttaaacccacagaacggtacacaccccacagcatccctctcaaaccttgggacctccagtccttacactgcttactttagtgcaggcatacctatgtgtccggcttttaaaactcataaccctgggctcatgggggccaggtcctttctttttaagcttcttttcttgctgtttcaaccttctgttgtgggatgttgctaaagaaaaaaagtgttcatgacacttgttaaagatggcaaggaagactattcaaggtcagggactaggatgggaagtatagggaccattgcaatggggtcttacagtgggggagacagactggtctcaactctgactccagcaagcgtaagtggagatttatagccaaggagcaaggtgaggggtcaggagatggaaaattactaagagacatcagggatagggggattctggctagactgacttgataaaattcttgcttaaggcaggccagagtgggggataaggaatttgattagattaccaaggatgagagattttcactaaactgaccaagcaagagtctgctaaaactggactaactggccagagtcactagggcaagatcagagccaaagaccagggcctagtaagaaagagaactcagagaaacctgactcaagtcttgtcaagggagagaatgacagagtccagaagggcggagctcagggctcaaagcaatgcacttctgatcctcagtggtggtgccattcaatgacttcggcttcaggtcctgtgttttactccttttgccttgcaccttcgattatacactctttcgtggacatacaaggactttgaaattgttcaaagtctggtaaaaaatttccataaagtacttccatagcttttagcagattctctaaggggtccctatgagatttaaaaaaaaaaatctagactcctcataagtgtctctcagagctgtgacctacacactcatggtgacttgttaaaaatgcaaattcctaggccccagtctggaactggctcagggattggcaattcctaaaacgcccagaaacctgcatttttaaacaactatctcttattaagaaatgcctgatcttcaaggtggcagcaccaagctgtgatgacatttgaagtcctggattgaaatcttcctattattttgctaggacctgggcttggaatgcatccagcatcctgctgaggcctgggggagctgaaggggtgggggaagccggctgtatgtttgcaggtgcaaacatggctgtatttctcacgtggccttttccctggggctttattttgtccagcaagccagcccagtttccattgttttcaacaactgtgattgctgccagtgtgtagggaaatgtgaactctaaagcttgattcaaacactgtgaccagcttttattccaaacagcagcccctagggctctgtttgcaaggcagccccgaggcctttgaggccagggtcacagtttcctctgtttgggggcagaaggagcacaagctgacctttccctggctctctacagccttgtaaatgttgaagtttgtgtagtttgctcgttctttacaatcccgcagagctccttgggtcagtttcagcacagggagcgctcgactattaagcatttttgaggaccctgggcaggaaatacccacgttggccctcttgcttgtagcaccaggttcaaagctggtcaggaggttatgtcccaggtgctgaccatgattatactgctttgggagatgatctccttgctttaggtcacagacaagttagtgacacaactagaccccacatttgacatctagcccagtggctcagttctcagccttctttgcttccaatggagaaccagtcacccatacagcagaaaatctgacacattctgtccctcagacctgtgggatatagaaaggctattttcctgttgaaccaacccctcccatgcccctttcctctcccaatccactggaccagaaaatggtacaaactctaaaaaacatcagacattacacttgggtcctagtttttgagggccaatgtcctgggactttctccccaagtttttcaaaaacaatcacataaaagcgaactattgataatttaatagatatttattccaggtagaactccacacaaggtaaactataatccctagagattacacacttccttcttcctcacctcaattcattaccaagtcctagtaatgttaattccatttacctcttgactccattgaccgctgtctatccacagtccccagcctggttaggtttccaactcctgagcttgaatgattgaaatagcctcctacttctgttcagtttcactcctacctccaaccccagatccattctctacaaagcaggtagggctatattttctaaaatacaaatttgattatgtcattcccagcttaaagcctgtcaagagctttagaaaatctaccataatgaggtccccttgtgatagggttcccaccaactttctaagcctgctttccttgtcttctatgtgctttctgttacatttctagaaaacgctgtgctatttctcttcctttccctgctcaacgtctagatcatccttcagagctcatcagaaaaccctccctctgagaacttttcctgacctcccaactggtcaggagtccctgttaaagccttatagcacttatcagcacttaccaccatctatatttatatattttcatgtgactctttaattagtgcctgcctcctctgtctcgactgtgagtcctcagagggcagagactctgtttagttacatcctcctttttccctgatgacagtcactgtaccaaactcagagatattcattctatttctaatgaatgagcctaatgaatgaggaaaagagtaacttcctacattaaagaagtttactgactgggttggaaacattgaaatcttcctctcttgtacttgctaagtgagccctaggatttgtatgacaaaaagccatatatagctcaaatctgctttggaggctttgtggggccactaggtcagcaagaacacctggcttgtgctctgaaacaattagcctgacttgggttgcattggattttgttaaaacatgtgccgattgctacgaaaactgtttgcatataatcaatcttcagctgcagagagatgtcgagtatgggagggcgtgtcacgctggctgtttataaactctgcacgactgaggactcttccccaacatcccagagtctgtagtccttgcctgccctttcccaaagcaggagtgcccttctggatgagcccattgcgtgaattattttccttttgcttcctcaaaatcaaatgagccaatgtatttggggccccagggtaagggaagaatgtgagacacattcctggtgtgtccaagaccaaattgaagggaggtccaataatgtaaggtcaagtagccataggagtctatgggctgcatgcttctgtacttctctatgcctcattcccctcatctgcaaaatgggatgagagtgattcctaccttgtcaggagataggaaggcctaataggaatagtccatatgaagcagtgggaacagtgcccagcacatagtaaatactcagccagaggtatctttggtaaaacttcatcaaagacactcaagctgactgctggtgaaggtggagagttccctgattccccttgtaggacctctgattcccctcataggatgtgcgacacgagtgtggctcacctgtttcatcaccccacagctcaaattcctagggggaacatgcagacgggcaagtgcagaggccggagtgagtgctttgggctcttgaccccacggtagtgtctatcggtgagtgcctgcaacaccagtgttacaaagctctttcagctttaccatctgcagacagctttgagtgttaatcagctcaatggaccctctgccttattgcaaaggaagagggccagtatgacagccttctgtatcccaagctcttgtccagtgtcctggaataatcagatcacatgtgggcttgaagaatgagtgcagggttttgagtggtggaggtggctctcagcgagactgatgggaagctggaaggtggaggggtgggggagataatcttcccctggagtttggctgttctcagctgaactcctctcaacattcaggtgccccttagctccttctctgctgtgccaccctgctgctgtccgctgctctctgccactctccgtggctcctcttgatgttcagctgcttgtgtgtgtgaccgataaggtctcaggtttatatggcagcaggatcagggggcatggcaggccaaaaggcaagtttttgggtgcaaaaacagaaatgcctgtcctcatttagggctgcgggttttcaggcttgagggtgaggcctttgctggggaaccaccctcttctacccagtatttccctgactcctatctggataactggttctcaggtctcctgttagtggctaccagccccagttggtaacacaatcactggggagctgtttaaaagtacaaactccatggcctcactgaatcaacattatcctagaaattctgaccgggacatgtgtattaaaaaagaaaggtccaaagtgaagtaactcaggaatggaaaacaaataccacatgacctcacttacaagtgggagctaagctgtgggtacaaaaggcacacccagaatgagcattggagattcagaatggggagggtaggagggaggcaagggatgaaaaactacctattgggcacaatggatactacttgagtgacaggtgcactaaaatctcagacttcaccaccagacaattcatctaagtagccaaaaatcacttataccccaaaatctattgaaataaaaaaaaagtcctcagttgagtttgaaccgtaaggaccatcaatgaccactgcacagtttctgagtgagatttggacaagtgtctcgctctctttgtacctcagctttctcctctttacttaatgttgtgtcggctctatgtctgtttcatagcaggtcaagagagaaactcttggtaacaccagtgcttaacttagagcacacttgctttacttaaatatatgtattgccatctgccaaacaaaatgacaacttttatctctgcttgttcactttgtgtctttgtctagatgcaaatatatacttgaaatatcattcgtgttgctaaatatccacttatttagctccttcttttataagcatgcttctgtgttcccattttagctagaaaattttaactgtagttgttgcataaaatttcagtgactatatatatatatatatatacactaatttaaattaactgtatctctatttttggatggctaggttgtttgtaagttttctcactactataattcattctggaatgtgtattttcaaacatatagtttttctatatttaggtattttactgagtacattcccagtattgttattactgaattaaatgtatgaactttttttttgtttgtcttggcaatcaattgccaagttattttctgaataagtgttgccaaaatatactctgccaaccactaattaatgacagtttcatagtctctgtgccagcattcaaaattagcattttattttatatttttactaactgaatatacgtgtggcatttcatagttgctttatttacattttaaagcgtactttatcaattatatatatacactccttgcatgctatgtcaaattcccatgtggtggtataactaccaactcgataatacatagattcatcaactctgttcatcagagtgactttatagggtttatgtcaggaattgcctcaggtaaggagaataccactgttgttctctctttagccagctgttttctgttacaggtcctgaaggctggggctggcaagatgctgatgcaaccagggaagtggggcaacagacctctctgccacccagcccagagcctggcttaggccccaggaaatttgcctcccacctctctcttcctaggcccaggtcccagcctcttttcctattcaacatctgcaccaaccctcaccttggtacagggagctttctacacgctcattttcctcattagttggttaacaattcattaaatcaacaaatatttattgggcacttaccatgtgcaggcaatgtgctggggcacaggctacaatagagagggaaaaagcaggtgataaaacagagcttgtctccctggatctcataacccatcaggagataaagacgtgtattaggttgccacacacaactgtgtcaatcactctgcctcaaccatctagggaccttcaccacgtgaacttctttctgcctctgggtgtttgtgcatactgccccctgtgcctggagtcctcccataactaactctgtctgctgtgcatggagtcctcccataactggctctgttcgctgtgcctggagtcctcccgtaattggctctgccacctgtgcccagagtcctcccataactgactctgtctgctgtgcctggagtcctcccataactggctctgtccgctgttcctggagtcctcccataactgactctgtctgctgtgcctggagtcctcccataactgactctgtctgctgtgcctggagtcctcccatggctagctctgtcctttgcacttggagtcctcccataactggctctgccccctgtgcctggagtcctccatggctggctctgtcccctgcgcctgcagtcctcccataactggctctgtctgctgtgcttggagtcctcccgtaactggctctgaccctgcccctggagtcctctgtggctggctctcctccctcttcctggagtcctcccatggctggctctgccccctgaacctggagtcctcccatggctggctctgccccctgtgtctggagtcctctgtggctggctctgccccctgtgtctggagtctctgtgtctggctctgcctgctgtgcctggagtcctcccatggctggctctgccccctgaacctggagtcctcccatggctggttctgccccctgtgtctggagtcctctgtggctggctctgccccctgtgcctggagttctctgtggctggctctgccccctgtgcctggagtccttccttggctgcctctctcactccttccaactctgctcaaacatcaattttttaggggatacatctctgagaatggtgcacacaatactactgggctcttcttcccaccagtgctacctttcccagcctcattttcctccgtagcacttctcaccatccaatatactaatgaagacttgtgtttgcttattggctcttcccttcactgaatgtaagatccatgagggcaggagctctgtgtgtttttttttttcattgctatgaacagtgcctggcatagaggaacctcctaataaatgtctcctaataaataaaactgaacacgtgaatgaatgggttttattctgattcccacataggtagggggcccctggagaatttgtatggacatttgttggctgcagtgggtgcaatgggaagatgagtggtggacagggactaggggtgggaggatcagtcttttctagggccctgggcacactcctagtccttgcaataggactggcaagagcatctcagaactaaggctttgggtcctcctggagggaaaccctgggctcctctggcagtggttctgccccttcaccagacaggcagggactgccattgatttctggagatgctgaaagattcctcctgcagccagaagcagagtcagccaggaaggctgcgatttccagtctgtacaattaacattattatggaggtgtaatctctctaattggtttatttcatcaagatttgattgaaggcttctcttatctgccactgcagcctccctctacctaaggctcacgaataataggaagcaaaatgtatgcctgactcggcctcctcctaaagagaccagcccgtaaataaaacatctgggtctcctggggaggcgacggcatgaagggctgtgagcgggaacccactgattgatggagacaggagagtgttttcttaagtgaggcagggagtgatttctcctctggacctgggccccagagctgggtttctctgcaagagcagccagcctggaaatggcgctggcaatggaggaaggagggtggcagggggatggctgaagccccggcacactggcttggccttttgtttttttctttttcctaaccagacttctctgagaagaaggaagaataacttatgcctccacaggtctttccctgacaggtgctaacaggtcttcatgttgtcatgtaattaaccaacaagtcaatgatttttcagcaacacccagagagaatgagtttatgcccagttctgtccctaacttgaccaggctttagctccttgtctatgtaatgaagattgaacataatatcagagggcacttgctctctccagcagcaaatattgttgatcgatcatagctgcagacccaaaagggagcctttccatgcccagagagccatctttagtagacgaagattggtacaggagaattggaacctcttcctcctccctggaacccccaagaaaactctctccctcttagacgtaagagaatgattttgaaacctcagtctgattccaacacagtcaccacagctgagagttttgaaggaagtctttttcagaatagcattcccttcatgatatgcagaggtggtttgagttttaggaaatgcctaatgatagcacaggacagaattctaaaggcaccagcaagcagcaagcctatcagaaatagttgaagccaggcatggtggtaggtgcctgcagtcccagctactcagaagactgaggtgagaggattgcttgaggctaggagttcaagactacagtgcatttctgattgcatctgaaaatagccactgtaccccagcctgggcaacacagcaagaccctgtctcttaagataaaagcaaacaaacaaaaaacaaccaatgttgaggttacacattcccatcaacagcaaagcagataaatattactatttatttggttgtgttctatttacacaatgaaatactatacaacaatgagaacgcacagtctacaaccacatccatacatgagggatctgatgatgggaatagtgttaaaagaaagaaaacagacacagaagagagtatggtgtgtgattccctttatatgaaacgcaacaggtagaccagtccccggtattagacatcagcatgatgtttgccctgggcgaggcagtgactggaagggtatgtgaggaaggcttcggggaggtgataatgtttattgttgttggctgtgttggttttggggaaacattcagtttgggaagagtcattaagctgtgcacttgtgataagagtgctcccataaaaggttttataagatttgggggctggaaagatatatctgtcagtgagatttctcgccatcccagttccctgtccctgctttccttggcttgcgcccttgccctcttggcttgtcgcatctccctgtgaccttcccatgggcattcctcatggtgagaagtagtgtggcagagtggggaaagacttggaagaggtgccacaacacctggctttgatgccaggttttaccacatgtgaagctcgaggcaggcctcatgccatctgttaagctccagtttcctagcctggtcctgaaaagcgggcttagtctgtcctctctctatacgtgcttgggtgcccttcctctcacctcggtcctctaggtagctttattgcaccatagaatagagacgtggggactgtgagcttgtggcatcaggcagacctgtgcataacaaagccttgggcagtgattctagatttctctattctctaagggaggctgactattatataaagtcatagcaggcccagcgtcccttattcaaatctccaaacaaatgagacaattaacttggggaagtctcctaagccagagcttcccggacaaaacaagactatgattaacaagtgacaaggatagacatcttacaaacatgaagctggcattctcaaaactttgggggaaatgtgtgctcttgaaaaactcattggtaccttccatattataaatctgtttaaagtgtgcttgatagaatttgttttttttaaagaacagttgaaagtgaggggaaaaaaaaaagcttggtccctgaaacccaatgggttaattctcccctgtggcagaggaaatgccaagcagcctttggcagcgttcttccttctttgtataacaacactttcaagagctagagctgggatcatccagtaatgcttttaatttgtgtgtggttgcgaagaggccaggatttaatcgaaattgttagaatggctttgcttggagtagctgagtgcttgcagtagggctaggaggcaaggtagcgctggaataattaaaagaaatacctaaggcatcatcattgcctgagttattccagataccaggctgcagagtaaaaatagtgaaataaaatttgtgcacagttacttttctattatacctcaattttctctcttcccattcacctaataaaaggagctaggtctccatgtttgcttaacggggtggaggctaagccctgggaactggctgtttctcagccagcccaggtgctccaagttcctatttttatcctgctctgtactgtgggtggtctgaactggcttaccctcctgaattacatgtagtacacagctgtgctgagaacatttttcttgtcgtaccttccctaggtaatgggacagcaagagctccaaatcttaccctcctgagtgtcatccttaaacaacatgtgaaaaaaaaaatagtcacaggaattggggtttccatacttgtcctcatttctatcctctttctaaagagaacctgtgcccccaagtccccagacaacatatggtcaagattaggaatcatgtccccaaaagactaaataattcaagaaaaaactgagcacatctgtgaagcagagatattcacctgacttatttatatgttataaacacttaagtgtaccacaggggaccaagcatatgccaggcaagtcagtcactcaatcaacaagggttcatttacctctacaaaccattcagtttttcttttccccaatactgcaaggccctgtgctaagttctaaggtaaagaagagagaaagaggtgagccttctattctgaagccctgctaaaaagtgaggtatcacacgtggaaaggtttgaggtagatgtttattcaatgtgtttgggccaatagggcacttctttcgccgtgtggcaatgtgtttcagcacctctggcatcaagggtgaaggccttagcagttacccacagtgaaacaacctttgcaaaaattgtaacagtgagaaaattatgaccgtgaaagagacccgatccaaccaatccccatcttgcttttaatctccaaactgcctttggtcattccagggcttgggccaggctaactttgggagaaatttgattcatagttttttatttatttatttattttgagatggagtctcactcttgttgccgaggctggagcgcaatggtgccatcttggctcactgcaacctccgcctcccaggttcaagcgattatcctgcctcagcctcccaagtagctgggattacaggcatgtgccaccatgcccggtggctaatttttgtacttttagtagagatggggtttctctacgttggtcaggctggggcctccaggagtcagggtggttctaggggacaccatgcacttgtgagtggacagaccaccagccggaaaacaaaacaaaacaaaacaaaacaaacaaaacaaaaaaactgaagaagcagtgaggatggacccccggtctccgagtgtgagtgcagcaggcctaagcagccatggggataagtgggcacagtgtgtcccctgaacagcccactgtcctggagggagcactgtcacagagtcattggtcttatttagcctggcccagaggatgaccaaatgtgcagcactctggctggaacctggtgtcacaattctttcatctgttcccactccctacctcttgccctcgccatttctctctcttacctcagaaaagctggaaaccagcccttctgcttccagaacgatcttttagtatctgttctgctgtgctatgaattacattctcagtgcctagtccccatttctcccaggtacttctggcaaactcatttcctaaatgccattttcgttttggtcattccctttgcaaaatctcccgtggctccttcatgcttacaggtggagagatgaactcccttgcctggtattcaaggatctctaccatctggctctacctggttaacctcatcaaattctggaaagacacatctatccgacctcagtgatctggattccttggcatctctaggcactgcatgctcattttctcttttcaacttttgtttatattgcctcattatcttgaattcctctttgctcttattttctatccatatcccatacatgtgccaaattccaggacggatttctgtaataggagagaatagaagaaaggtgtattcataaattgtcctagggcaaatcttgaattaatttagatagagagattattaaataaaatcaagtaataatataatattaaaatacaactaaactatttcatcacatcgtacatctaaataaattccaggtatattaaaatattatattttacaataaaaacacaaaagttgcaaataaaatatagataaaacttttttatatcttattttatttagagacagggtcttgctctgtcacccacgctgtggcatgatcatagctcgctgcagcctccaactcctaggctcaaacaatcccccacctcaggtgtgtaccaccaggcctggctatttttgttagttagtttttgtagagacagtctcactgtgttgcccaggctggcttttaactcctggcctcaagcaatcctcccactttggcctcccaaagtgctgggattacagatgtgtgggtcaccatccccagcccataaatgttttggaagtccctaaaaagaaatagaatttctaaaacccagcactttgggaggctgaggtggatgcatcacctgcagtcaggagttcgagaccagcctagccaacatggtgaaaccccgtctctactaaaaatataaaaattagctgggcatggtggcacgtgcctgtaatcccagctactcgggaggctgaggcaggagaattgcttgaacctaggaggcagaggttgcagtgagctgagatcgcgacattgcactccagcctgggcgacaagagcgaaactccgtctcaaaaaacaacaaaaagaatttctgaaagaaagaaagaaagagaaagaaaaagattagcagagtgacaatagataagcaaagtcaagtggaaaactgcaaattgggtaactgttcacactaaacaaggcaagtatctcatcttttgtagatacccataagaaaacattaaagtgtaattaaaaactgaacagagaacattaacaaacattctactgcagataaaatataattagacaaaggaaaataatgcaagttaaagcagtagattcttttttatacataccagattggcaaagtaaaataataatagtgataacaacaataatttatggcaaaagtgcactgacgtggataaagcacatattatcggtgagtaaaacatctgagaaatcaactcgacatttttcaagaacctgaaaaatgattacacaattttatgataagtccatctatggataggtattctaaactatgtttatactagtgaatatttgaaaacagactaactctctcacaaaaggagaatgattaaataaatatatgtaagaggcaaaatttgattcagttattagcatactagtctctaggaatttttgatagcaggaaaattagtccagatttaatataagacaaaaaatggaatagaaacatctatgtaaaaacaaacaaaaagaaatgtctacatagctcattatctcaaatacgcaaaaatagacatgcacacatgtgcatgcacacacacactcaaataatatatactaaaaggaaatccaccaaaatgaattattagctattctgtgtgtagaatcatgagctattttcattttattatttataattttttttgcaaattttacatcagaaatctctattactttagaatcagaggtaaatgaaatgaatactttaaaatttccaattaatttcagccacaaagatgtcagcattctttaaagtcctgtatcgcatacatcctctgtacatcttccatctatgcaagtgtttattctgccagttcttcaatatccactagtctttcttctccatactaaacagtagtttattgtaagtattggaaggaagagatcatgtcaggggtccagttcactaatctttccaaggccccattcccttcagggaatattgatggagaactgatagggctgtttaacaattaagtgacacaattaatataaagtactgttgacaatgcctggcacatagcaagcactcaggtgaagaccaaggcgttagggtcaggttgacatgggttcaagcctggactctgagatttattagtgacaagattttgaaaaagctccttggcctcgctgagccacacttttattgttaagtgagaatcacagcagctattgttagcaagctgctgtgatgtggcatgtcaggtgcttttagcctagtgattggctgcaggaagcacttgatgaacagctgctgcggtgattcctcccaggagcagtggtgatagtagcagtacttccagtagtgatttttcttcccctgctttccttgtcactccattttagtggtaaactttttgagtgctgaggttctttgttagatctcatgctctgtccctttctcagacgggcattcagtctggcatctttcatttaggggatgaaacatgacaaattatttctcagtagccgagacgaaccagctttttgttggtaattcaggggcttctgagggaacagctagtgggtgtgtggtttccatgagtcctctgaattcgatgagagtggccaatgtgtggcagcaatgagtcaagacacctgtgcacctagcgtagagaacaggtattttgctggatttgattgaagatattcttccatggcaccttatgtttatattttctatatcgattattaatgaaagataaagatctgttgacttgtctgcattccatgatagactgtaagcttcaggagggaaaggatcatgtttctttttttactcatccaacaaatgttttggttgaacatttctctctctctctctctctctctccccacctgtctgtctctatctctgtctctctatctctcactccatctctatgtatgtatgtatgtatgtatctatctatctatctatctacgtctatttctctctctctacctacctatctctatctatgccagacactttgcaagttgttgaatattcagtggtgtacaaaataatcatgactttgcattcacaaactctagtggagaagagggctatttcataaataaatacacaaataagaatataattacaactggtgatgattcttttttatgaaggacaagaacatgagctccatgagagagaatagaattgtggtggtgagagattgacctaatttagacagagggggtcagggaaggcctgttggaagatgtggtacttgagattgaggatgagtagttctgtctagaagggagtggcttattcagtgctgcatctttggttactaccaatagcactattcaagaggatacaaccctaggtcccttaagaaaaaaaatttttttaagtgactctttgggtagaaagtcagagaatgagctggggaaaaagcacactggcccaagaaagagaaaacttggcaagtctgcctgaagactgaaggagacatgggaagaagaaagaagtgtttaagacatagactgagtccctgggaagcactacaagtcaggaactgctcatggtggcttgtttttgaaaacagaccccacacaaagctctgctgattgatggtttgtttcagaatggtgacacatccagaaaacaacacagacacaatatttcaaagtagaaaagaaaaatatgtctgatatccagaaataattaccaaccaattgaaatctattctacagttgcccccaaatgccaatggaaacaacattacatgactcacaaattcttttctgtccgctgtcttagccagcttgggctgccataacaaaatactatagactgagtggcttatacaacagaaattaattttctcacaattctggaggctagaagtccaagatcaaggttcttgctgattcatttcctgctgaggcctctcttcctggctttcagacagctaccttcttgctatgttctcatatgattttcccttggtttgtatgcaaggaaagggagggagagagtgagaaagtgagttctctggagtctcttcttataaggacactaatcttatggaattagggcctctctcttatgactccatttaaccttaattacttcattagtgggtctgtctttacatacaaccatataaaggcttcagcatataaattttggaaggggtacaagcattcactccttaggatctatttatgttctgaaggtcccactaatcactgcaaagtagctgggtccagtaaacatgttttctgcctcttcatgtctctccttttctcaaaactcaaaatgacctcaagtcttcccacatctcaaaccccatctagccttaatcctgtgacccgtgatctgttccactctttctaatgtaggtgtagctggcttctctagacttctccttcagttctcctttctgcctattgatcatcataaacatcaaaaagccaggtgtggtggttgcctatgtcacaaagggcattctccttcagcaagcaggactggggagtggctcaggatgactcacattttagtatttttctttccatgctcttggtttgccatgccccctttgtctccacatcacttgtcttacttgcccctgatagtatttgagtggcacagacaaaaagggaactgccaccaccatcaggtctcaagagcacatttagcacctgcagagctccgtatgtgcaaaccaatggcccagcactgacatttttggctcccgctaattagctatttccccttccaggatgggtactgccctctgttttgcccaaagtaaatgaattaagttgtttccatacttgaggccaacccttttgtcagcagcagcaacttaattactctccccctatgaggcagagctggagctggttcaagtgttccaccaatggccagcaggagaaaaaaaaaatcattagaaaatcaattcttatttaattgaagatttttcctccgaatggaaataaagtgggatttatcactgcagtagcctcacagcctgggtaatgactgcacttttgcctttctgggtttcccttggtagataagatgtcttcagcacccaggctcagcagcaccacacacgctgacttctgagggtctgagagagctaaggaaagcaacagcctggatgatgaatccactcaggatgtgggccaaagctgtacaaccaaaagatgatgagaaacaatgcttagaagtaagatcaatacaggagactagaacccgttggtctctcttcttgcaagaaatttaaaatagcatattttttagggctgcttatttctcttaaggatctgctattgcctatagcattgagactcccaggaagtgctgagtcatggtccccagcatttgctgggacaaatatgaattccatctagttatgggcaccacactggtactttgacactccaggaatggtgaccagaatgatgactcacccagaaactacagcattggagggagaattgaaagcattgagagctttttgttttgagaaatgaaagttcagagatgtgagaggtgtcttcaaacctgtgaatggcatagccttgctttgagttgctgaaatgggtagaactagggtactcctcacagggaggtggaccatgatgtatttaatgcaggagctgttaacagaactgcttagaaaagcttaggattgtgtttagggaagctggatttgaggaagttaatatttcaaggccacaaattcctccattattcccctcaaacaagtgtctatctatttgtctatcatctatctatctatctatctatctatctatctatctatctatctatcttctatcatctatctatctacctattgatctatcatcttatctatcatctatctatctcaactgaatggcaaaccccaattcaacaagccctctatcaaaagatcccctgagaaattgttagcatagtatttggagaaattagaccatgctaatatctattttaaaacttcagttgctcctgttttctgtaaggtgaaactgagaccattggaaggagctgcaatgtctgtttttcacaatgcaaccctagtctactcctctggtttatgtcctttccttctctctcctataagacctctttatgatgcggacacagtgatattatagtccttacccaagaatgctatgcctttttccatcagcttacctttgcccattgagaaggctgcctggaaaccctttctcccgtttgctttgggaaatacctattcttcgagacccaaattttgtgggtcttgcctctctgcaccaagaacaactcatgccagcattttaacagtcttcattattttatgctgcaaatttgtgtttgtgtgtctgtctctcccactagagtaagatcacattcaaggataataatcctgtcttattattttggaaaaattgtctctacaagacctgtttgaaggtatcagattgattatcacgtgttcatgcccagaaatacatgaatagaaattagtttgtaccatgagtcacacacttggaaataaaatacaagatagttaaatatcaagtagaaaagtgaaaagaactttaaatttgtccaaaggatatcaaatataattgccatggtagatcaagagctgtgaaagagccctggatgtcttataaagactgggaggtgaggataacaaataatagctaccacttaattaagaaaagcatgatgatagctacccaagtaagtgattttgcagatattgcctagttcaatgcttacaacaacacaatgaagtaagaactaatatctctgtttatgaagtaaaagatgaagactcacagagtcaacttttaatgccacacaacaattagggtgttggtacttggctttaaactcatatcagacatgaaatgccattttcttcagcactacgcaataatgtctccctagataaatcaagatggcttcagaaacatgccccttggatggacctttgtattagttatcaattgttgtgtaatgaattacatcatagcatagtgtcttaaaataagagatatttattatctcacaatttctatttggaagctatctgagtgcagcttaattgagagcctctgcctcaaggtctcttatgaggttgcagtcatgccaggtcttgggctgtggtctcatctcaagtcttgactgggcagaatccactcctgagctctctcacacgaccagtggcagatttcagctcctccccagctgttggccacagacatcagttctttgtcacatggacctaatctcagacacgacatcccatcacttctatttgctagaagcgagtcttgaggttcaattatactcaaagtgggggactgcacaaggacaggaatcacgggaggcagagaatgtgcatgctattttagagactgcttcccatccctgaaccacttgctgtgctctggaacaaatggcagaatgttcaggggaggggatgggaaagtgaggctgtcatcagcctctgaggacctgaagggcatgagctgcccacagtctgaggaagatttctcttatttactagcaacatttgtaaagcctccacatcacgaggactctcaaaagctgacaaggtggagatgctcaacctcattttcaagtgttcaaactcaggcttagagatgctgaggtacatgattctgctatcaaacacagaaggaactctcagatgaaatgctgcctggaggtgtgatgacagtcaaagagagaagaatgtgatactgtgatataacaagaaatatctatttggtctctacctccagttgctgagacaaagctgctaaaacccttgtggatataggtgctaggagaatcttgtcttctaatgtttggtctttgacaccagtttctaaaacagagctcctaaggcctttgtaatttcctgagttgtaggaacatctgatacagagctcctaagttccttgggtgacagaagcatcttttgttctaatggggtgacttttcttgggttcctggatagctcaggatggggttggttgccaggggaaccaatcatgtgattagagcattgaaactttcaggctcactcctgacctctggaaaggatagaggggctaaaatttgagttgatcatcaatggtcagtgatgtaattaatcacgcctacatagtgaagcttccataggaaccccaaaagacagggttcagagagctcccaaattgctgagcatgtggaagtccctggagagtggcatgcctagggagggcatggaagctccacatcccttctcccaggcttcaccctatacaccttttccacctggctgttcacctgcatcctttgtaatagcctttataatacatgaatcaacaaagtaaaatgtttccttgagttctctgagccactctaacaaattaattgaacccaaaaaggggttatgggaatgcccaattttttggttggtcagaagcaaaggccataacctgtggctagagagactagcatgtgaagtgagggcagtcttggagactgaggtctcaatctgtgagatctgatgctatctccaggtagacagtgcccaaattgaatttaactgtggggaacccagctagtgtctctcagagaactgtgtggtgtgtagggaaatatctacacacattttgttgacaaggggtgaagtgttctgtgctgcattgagtgtgtgagagtaggaaaaagtttgttttttcctattacttacactttgtttttttcctatctcaaacaaggaagaaggacagagggttcctatgctgggggaaggtagtgtatgaccatgcctgacctcccagcttcttccgctgtgctgtattcctcacttggcatgtatctgcaagttgtttggagtgacctttctcaagatttgtgtgcatcaagaccggggtctttacagtatttcaacatttggattctctctattttcgttacaagaagcaaagccccacctgcgacacactggcctcaactttgttagataatcaatagtacactaatgcaatggattagaaatatgtggcaaaggactggtgcacaaactttttgttaatgaagcatgactgactttgtggctacctgaaaatgtccttgggccagctttctcccacgtccatattttcatattgggttcccctataagtggtcattttagacctctgttagccctcccgctagaaaataaccattgttgtcagttctgggtctagagtgttcccaagtctgttcactttctaaccagttggtctgaaatatttagtttgaaataagaaggggaataatgtatcattgggataaatcaggtatgggagaacttatcaaagttcaataaacataaaagtgatgaattttgaagtcacacaattaactcaggattacatgtgcaataactgagtaattacacctttaataatgcattgaacttgtcaagaatacttactcattctgctcaaattttttttaacaagatagcctatagcaagtgactgtaattagatattgcctctgaaaacatcgacagctcctaattgataccttttattataaagctagatgccaaacatttgctgttgagttgattaaggaataatattagatgtgttgagatcataatacctacttgcagaaatctcatgtaagtagaaaaaaaaaatccagttcgacccatcaatcacccaggtaaagttggttcaagtttgcactggtttgctttaaattacagcctgacagcgattgctattgccagggctgtcaggaaaagaaactaggggcagaagcaggtgggaatggagatggggtcccaaactgcttccttttttccacgtggatggtcaggagagatggcactgggagatcgcagatggcaaaatgtctccatgtggcgaggggaaggagagactatatttgctcttgtcttttgacgaaagattatttttttccacatcaaggttgatattaaggacttttttttgttgttcttttgtattttctcaacagctgtttgagacagggctctaacattcataaagataaaagagagaagctgtggtttaggagtgtcggggagtttccccagcctcagccccatctccagggtttcttctctgtatagtttcctctaaatccagagttcctattacagggaagccttgggaacattttagaaggaggcagatgttttcataggcattagggagcaggtgaacaacctccagatagcaatcacctcacggcccatgagaggcaggtttcaggtagtgaagagcttgagctctgccctgtttggatccttctcttccagggttacctaccatgggatctgaagcaggtaagttgagttgatcaccaatggccaatgtctttatctgtaaaattatccttacagtccagaccctgctgatgcagtgccagggcatgggtacagatagtgaccctcataccaatgactacatatttaaaagctatatatcaagccagcaaactgtggaatcaaacattttctatcctcctactttgacagaaacaccttcaaaaagaaaatgtgtaggccgggcacagtggctcacgtctgaaatcccaacactttgggaggccgaggcagttggatcatgaggttaggagattgagaccatcctggcaaacatggtgaaaccctgtctctactaaaaaaaagaaaaaaaaaaaaaaaatagcagagcagggtggtgggcgcctgtagtcgcagctatttaggaggctgaggcaggagaccctcttgaacccggaaggcggaggttgcagtgagccgagatcccgccactgtactccagcctggtgacagagcaagactccgtctcaaaaaaaaaaaaaaaaaaaaaaaaagaagaaaaagaaagacagaaaatgggtaaagctatgatacttatatgactgaaagacatccaaatataaaaggtggccaaatgtaattgttactgcatggttctggatgtgctattagtaaacagagatactgggttagtcataaaataaagatgcatattatttacaaattattttgtatttattccataaaaattatttattcctttgagttctcagcaaaatcactatgttactataatcaagattttcacagaattttgttctattggcaataatgacctgaacaattataacataaaatgtgatttattcaaaatgtgtatatattttatatatttatattttacatccataaaaatgcaaactaagtcaacgttggaaatgttaaaataattttaaaatgtaaatgtaaaaactaaaacatatattttaagtgttctcagaaaagtcagtattctacaatattgaaaaatactaaaagcaaaaggaaaaatcgattacttaaataggcaacacaaaatggaaagtgtcatttaataacattaaataaaatgacattttaatgtatttatgatttaattaagattttgtagaaaaattcaaacaaagccacaactctaggattcaatattcatctagttgtcggtgtaaaaatgtggtatcatgcttcatgcatgttatgtctagactcacatatattcaaatttcaaagttctatgaattgcttaacattgcaaaatattccatggctgttctgaggggctgttgtgaatgctggactgatttgtgaataactcgagactcaacattggaacacaaaaagaagcaagaaaatggttgcaggaaatgagacttcgttacagaagaatcttttgcattcatgcagagaggaaagatttgacaagctaacagatttctcttttgtctcctctcaaatcctcctcaatcccagagcagtgtccatttctgaagacagcagcacaactcacagacctcatgacatttaaatacagtctcctttggtttcaaggtcacccactgggcaagaggggtgacgagtatttccctgggattttaatcttgttagtcgtaggggtggctttgtaggacactggctcccgcgtaacaaagacattgtgaggtatataactttttttaaaaaactttattttagaacagcttcaggtttacagaattacgaagatatactttttgaagatacaaaagtgctatatgtttccatacacccattttccccttttattagcatcttacattagtatgacacatttattagaaagaacccatattgttattattaactgaagtccatattttactcagattttcttcgttttccccaaatatcctatgtcaattccaggatcctatccagaataccacatggaatttagttgtcaggtctccttagaatcctcttggatgtgacagtttctcagacttgttttgtttttgatggcctagacagttttagattactggctaggtattttgcagaatgtccttcaattgggatttgtctaatgtttttctcataattagctattggtttttcggaggaagaccacagatggcattcgcatcacatcatatcatcaaaagacgtgtcactcttgatattgaccttgatcacctggctgagttagtatttgtcaagttacctcactgtaaagttatgtgttttttcttcctttccacatcattctctttggaagggagtcactatctacagcccacgcttaaagactgaggagttttcctctaccgccttaaaggcacagtatctacatacattatttgtagttcttctgcatgggaaatttgtctctttctttccacttatttattaaataattcatttatatcagtatggactcatgaatatttattttatactttagattataatccaatatgactttgaaacattctattgctcaagttgttttagctttggccactgtgagtcctttcagctgggtcctgtgtcccttagacatacccccataattgtgttgtttttcttttaatctcgtttgaggactgtcttacttttcagcactacatgatgctacaggcttatctcatgtattttttttttttttttttgctcctgtcctagaatcagccatttttccaaggagccccaccatgaggtttcaataaatatattgttacctgtatgctcacaaaatgcaagttccaggcccaggagatggacctctcttttccaggtccaagagtaatgcaggttacactctttacatcatggagttgaaggaacagttaaaagagttcacgtgaacaaagtgcttggaatagttcctggcacatagtaaaagcccaataaatgttgactatgattatagctgcgtgcaatagaaactttctcatgtctcaccagtgaatgctgcctgttagcagcaaccatggcagtagaagtaggagccaatatttgagttatactctaccatgcagaaccatccagagattactcacatccagagatgatttctatggtttattctctggagcaaatctttttagttattgacccatatgggtttccctgtaagtaaagacaagtcatctgttacctatctcacctgggatgagttgcccagtggcaactcaggatgagaaggatgttctcatcctgctatgaagaaatatccaagactgggtaatttataaagaaaagaggtttaattgacccacagttccgcatagctgaggagacctcagggaacttacaatcatggcagaaggcacctcttcacagagtagcgggagagagaaatgagtgcccagcgaagggggaagcccagtataaaaccatcagatctggtgagaactcactatcactagaacagtatggaggaaacaacccctgtggttcagttatctccacatggttttgcccttgacacacagagattattacagttcaaggtaagatttgggtgcggacacagagccaaacctcatcagccagtgtcttttatttgaactcttttttttatatgtaaatgtcttatgtagtgtcatattctacttgcactttcttgttttccttgcctctactctgtacactctagtcttttggtggcttgatgctgaagtggctcccttacctctgctcaacctgatttctggctctaagaactccccctctctaggaaggggaaaactttctgttggaagttgaggcaaaacactccaggaggggacagctccctggggctgtacagagtgaccatgtatccaaggcttgctggagccagttgaagtcctacctcggtacttttacatttaacatcttactgcttaagtatcatttaccaaaaaaaaaaaacatatatatatatatatatgccactgttggaatgtaaatattttggaggaatttcagtcagttgggtaaataagataaatgcatgaaactataataaagcattctacagtagctgtcacattactgttgaggaggagaagttctgtaggagattggtaaggagaaaaaaaaggagaaagacgttacacatttcctgggtagagctacagagctgctaagggtgtggacgctggaaccagatggtctgggctcaaatactagctctgccacttgtaagtcatgtgaccttagacaagtcatttaacctctttttgcttcacttccctcatttggggatattttatacctccttcagaggtttgttttgaggataaaatgagtcaatatgcacaaagcacagagaatagggattggcacatattcagagctatgtaaagtttatgctatttttactaggtgtcacatgcaccatgcaagggacttcatgggatatttcattttgccttttatgcaaccctgacagggctacttgacctaacttttaaagacaaactcagagaaagagaggctgaggatcaaggatgcttatgtattggtaggagtgaacttggcatatacgaagccaaggagtcccatttaggtagggagaaggatagtattaggtagctaggaacagttcctagaacctgctgaggtttggtggttacactctgtacatcatggagttgaagggacagttaaaaaagtttgagagtaaacatagatcccaaataatgggatgcagtgactagattgcctggggctgcaatccacctcttccacctactgtgtgaccttgggcatacggcttaagtactttggaacctcaatttcctcatctgtaaaatggagataaccagttctacctcctggggatagtatgtgtttatacgcacttatctgtagaaagtatttatctttatacatgtaaaaccatttttacatgtatatcttttttacatgtaagtggcatttatctatttattccatgttttttctattctgtggttctgttatttttagcatccaacgtcaatataatagcaggtctttagaggccaaggaaatactgccactttcaatgtaaatgttaaatataaaatgaatccttgttacagaaaggataaaatataaaatgaacatctgtctcagaagagagaaatggagcagtagaatctcattaagcatctccccctctctcctccacctcttctgctaaactctccttctaaatgacagacccacttcttgggacttaacccacagccctgggcttccccaaactctgcctgtggtgacgcccaaggcaaggcctgaaggagcgtgtggagctaagaagtggacttgtagctcaaaggaggtagaaattgcagtagggggtatacaaattcttcagctttaaagaacttcagagttagacatcattaaatcattaaaagggcacctaaggggagttaatatgcagaaaagtagagctaatttgagctctcaagtgactaactcagaattgcccacttaaactctgaaccctttaattcatatgagtacattatagattccaaagaagacttttttcccctccttcaaactttggccttccctataggcagggcagagggtgggggtagctttcgtagagtggagctcaccacccagaaactctgcggtataaatatgcaggcaagggtttttgttttttttttttttttttttttttttttttttttttttttttggctgagagtaacaattaatagctactgcctggagctcctcactaaggcacagattttagtagacttcaatcctgccaggacatcctgagataagattagatcagtggttttcaacagaggatgattttatccccctgcgccactccaggagacatttggtaaagtttgaagacagttttagttgtcttggcttgggaggcaacagtgctactggcatctggtaggtggagtcctagaatgcacaagacaatccccaaaagaggattatctagcctcaaatgtccatagtactgggactgagaaaccctgggtaagaccagcagaaggtattaggttggtgcgaaagaaactgcagttttcgcaattactttcaatggcaaaaaccacgataacttttgcacgaacctaccaacctaataatttctcatcaggccactcttcctgaatgcagagagctactgacatcctccgcgccctctgcttccaatttctagctctgacaaatgtggataaatatatctggattttgaactcagaatatcttgccttgaaattcagtcactttatatttctaagcctcagttttctcatctgtaaaatggggattacaacagtcatctttgggttgttgtatagaatttagtctttatgcagtaagcactcaatacatgctaactgttattactgtcccaggattgaagcatccttgtttaggaaaacttcacttcccaaagggacataaaacttcttccaggtcatgaacttctgaatcctaggctccttttgccattgctgatcctgccacttttcctcaggcctcattttcttccaaatgcaattgttgcaatagggctagatggccaacttcccccattttaatcagaatctctgccagaatgaactattgaaagtgacagtctaaacgggttattctcatgccaagtcttgccacagcgcccactgcctacaaaataaaatttgtttcttatcatgccctcaaggtctaactcttaccctaaactcttaatatttgctgggctccaccttcaactattctcaccatatgctgtttctctaatatattggtccatgtcttccttctaagcttctgtttttgacattgcctctctctcttgagtgcccaccccttcttaagttgtcctatcaaatatttatttcccaagattcaggcgaagacacagctaggaaactatcactaaagcccaaggggggtctaggcttcatttacttgcatacccacggcacagagggcatgctttagttcaccaaattccttgcagtgttggacttttgggaaattgtctgtttcactcattgtttgtttcagaaacatactctcctggaaataaaacattggtatcagacttttctatccctctaattttgtcaggagtccgttacagctacaaaacttcctaaatctccagctttattttcctggggttaagaaataaaaccccactctgttccttcttagctctatgaccctgagtgagctatttaacctctcttagcttgttttctttttttaaatctgtaaaattggactaatagtctcattggtatctttgtgcatattaaatgagaaatttacataaagtactcagcacaatgcctggcactagtgctcactgacaactatttttcaaatggtagtcccttcagccttgaagggagaaaacagagagtttgaagaggtgagcagtagaccaggcatgtccatggggtacaattattcacttggaagataaaggaaatcaggaggtggagatgagactctttaaaaaaaaaaaaaaaacaattttgctatggttgagtcatgccaggctggactgccattgcctgggctggttctagagcatgtacacgtgtgtgtgctcatgtatgcctgtgtgcaggcatgtgcgtgcatgaatgagagatgaggggctcagtattgagcaacacagtttaggtttagaaacaggattcagccatgggcttctgctctgaccattgggaaaagatctgaacccttcaaagccaggataagggtctctaaagtaagaaggtgaacaataaaaccctggaagacccaaaagcagttgagaagcattacagcccttttgttgcaagccccaggaaacaggggaaaaataaacctggtctgacttcaccactcctgaaccataaaatgtttacctcgggggagggtagggacccaaaggaaggaaggttttctgttgtcaagctctcttctaaggatgtatcctgacccttgtcctcaggtctcctgggcctgaacaccccagggcctggagaatgctaatgcagtgaagggcttagccattcagcttctgggctgaggtcagcttctgctcagcactgagtcctggggagccttccttcctctttctgttctcgaggtctccatcactgtagggaggccatgactctgtcattctgtggatctgattctgggtgattccatgttgccccacagggtctgggtcagaacctacaccatgctagccttgtcaaggcagggcctctcttccctggggctgtgtctctggcttcctgcacttcctgttctctaagagagccacacaaagcccaatgttaccaccagctcctgcctcatcactctgcttgtctcctgtgaacttgttcctggtttgtttcagaaatgcgtcgatttaatgtactgcttaaacttacagatattggggtcagatgtgcagagttcctagtgggatgtccttggcagaaaatttagcttttcaaaagtttagtatcttcagctatcaggagggaatgatgacagcctttcccttataaagcggatgttgtaattagaggtgagaatgcaggtgaagtactgaactcggtacgtggcccgctgcaactacttggaatgaattgttaaatgacagtgtctgggtttagcccttttcagaattgctgtcactttacacttgaatgccagttcacctctcggggtgtggactaagctggaagtggttctgggcagcaggaagcctgttatagctctatacggcatgattctctcggctttaaggagatgggacttccctaacccctccatgtccatgtggtcattctgccagcttccagagaacatttatctgagtcccttgaagtcccagggagcaggtcatgcagcaggacgagaagactgtggctgaggacctgggacaggccctgtttctggcaccatgtctgtgttccacatctgaatgaggctgctggggatgctagaacagcaatctggaaagcagggagggttgggggcatcatacacaatggaactgggatggaaagcaggcctgggccacacacaggcttagagagtagaatggcctgtgagtctcagagattcaagtaacaggtgggccagttgggtcagtttggatccttgaagaaacagacatgaagaagagactagatacctaagagatttactatggtttgggggtagggtagggaacatttctacaatataagaggggagaaagtgaaatttggtggggaaaggcttcagaccatgatgcaggtaacacaccctaaggaaggacagaggaagagaaggattgggcaggagaaagttcacactgtggcacagttctgacaaagttctggccggcccatggcaaagttgcttatgagagggatcctgagtagggcaggaatagccctattctgatactctctgatgtgctcggtcttggctgggatcagtcaggggaactttggcctgacaataattgaagcgcggattcaaaggtgtggcagctggggctgtcaaccactcatgctttcctcagcgggttcctctgggggagatcggagcagagcagctccatggctgccataacagctgaaatgatttctttttagaagcttcaatcatgaaattgtctgtgataaggctgatggtctcactttccaactgacacacacacacacacatttactcactatgcatacatgagtatacagacaagcataaacaatacacatgcagatgcagatacatatagtgtgtcatgacataaatactgaacaagattcgagtctaaagtctggtatgaacaagatgcatagccttgaaaaaatcccttttattgaatttatttttcttaccaactatataattagaggcagcactcagacctcatttgactctatcattttatgagtttatggattacagtactcttacaaccagtatcagtacaaacagacattgtcaatggaaagttccagccaggcagagaacaaagggcacactcattcctttaatgtacattcatgggcacttcgggtaggttggtgaacaaactgcatggttcttgcccttctagaccagtattcaatgggaatacaaagagaaagaagaaatgaagtaaacaatggtgggcatttgtagaggataagcaagattcagtatcagagaactgtcgagagggggaactcttgagagatttcacacaatgttcatttgttcaacgtgaagggcaatttatccattccacacatatttatgggtcatttgctgtgtgccaggcatggtgctctctgttaggttaagtgagttctcagtcaaaaccatggacaaaggcgtccttttggacatcttcccagacctgcttggctctttgttaaaatggtacttgtcacaaacttgttggtgcaactcctgttaacaaaagcattccacagctcacgttctttgtgttttatttcctactgtgaaaacggcaatattaagcaagcaaatgaaaggtctttggcatagagtcagaggactgttgctttcttccagttctgccacatattagctctgtgctccagctgaccatgctgtctttctggttctcagtttacctgttgttaaggtggggatggaatgacatcttccatctcatccagttcccaggttactgcataaaaatattgtttttttctgtggaattccaacaagtctttctgttttatcaattcataagtgtatgttttaattaaaaaatattcttcaaagcaacaaagaagcaaaagagcaattatactgaatcccaaccaattcctcccagaaaatttattattattatgctgtattttattttttgagacagggtctcactctctcactctgttgctcaggctacagtacagtggcacaatcacagctcactacagcctcaatctcctagtctcaagtggtcctcctcacacccaactaatggttttattttttgtagggaagaggtctcactatgtgtcccagactggtcttgaacttctgagttcaagcaatcctctcgcctcagcctttcaaagtactgggattacaggcatgggccaccatggctagcaggaaattatttttaaacaaaatttacatttggctcccaattataccactttctagctatatggccttggacactttacctatttatttagagcctcagtttctccattgggaaaagagtttccaggtagatcctccttctgtgcttcagtgttttggcttagaggtagaggtgttttggcgtgttttgtaaatccaaggagaggctctgactagagccagcaagcccagctatttctagattctgatagaatgggtttcctccttgggcatctctctcgctttcacactttaagaccctgaggttgcagggaaaatagggtgacttttgttaaagagctgcaactcggcagttgtgttggaggtcatggtgcttcgtcagaggcagcagtaatgtgtttatttatcactgcctactgaccatatgtcccctttcccttcagtttgttctgcccaaggccgttggggtccgacagagatcaacagtgtttctaccgagatgcagcagctcgtcaaaacctgaattagatgttaaatctttttgaattggggaggaggtgaagggagggaggaatcatattgtgctaagaatttatcctgtgttgtttcctgtgagataatgtccctggaaagatttgttaccaagcaagttgcaaactgctgtttcaggctgataggtgttgccaattcattttgatgaattctgccagtcagaagagtatttttcccttctttcatttgctgaggttggctggagatggacaacggttttaagagctgagatggcacacactggcatgcccagggtatgtggaatcaaagatgctttgagaaatacttggtgctgcacagaaaagtaaattatcaggctaaaaatggtctatcctctgctctcagctcccaacccatgttctcagctgctgcttttcctagttacttactattgctccattgatcctcccctcccagactccatccctgtaccctgctagcttccaaacaaccctaatatccccattcccgctaggtggggaagaggtacaaccaagtagactctggagtcagactgaaccaggcagaagttcagtaccctctctaatgggctgacctggacaaattacatttctgtgaccaccaatttcttcatctgtaaactggaggtaaacataggctgggtctccctcactatttgaacttgcactatctgcaggcttgctatccaaacacaagcgctgaatagattcagatatatatttaaacaaattccttgctctccgaacttttgctcctcactctctaaaactcaggaacaaaacaggggtgctcctttttatcctcacttgctctccaaacagatacagattttgaagcacacttgtactggtttataaaatttagtgtgaaataatgtcattaaagtagttcgtacagtaccagttaataatgagtgctcaataggtgttcacgaggatgatgaggacaattaggcgaccttgaaatggagaatggtgctagtttggcacttaccttgttcctggatttccttggaattacagaccttcggcaaccccaattactacctcacatactggttcttccatctcagcctctccctatgcccctgctcatttcctaggcactttttctgagctgttgccttcccttccccttgccagtcatgagataagtgcagacctgtccccctattctggcagtgttgccagcccttagactcacactaaccattcctgggtctacaatacatcctgggcttcatactcttgcttctagaggggccttgtctttccaccttgcagatgaggcagctcctcccacttctggcccagaccctgcccagtgcaattcttcctactgcgactaatacatctgtattagtcagttctcacactgctaataaagacatacccaagactgggtaatttataaaggaaataaatttaattgactcagagtgtagcatggctggggaagcctcaggaaactaacagtcatggtggaaggggaagtaaacaggtcctttttcacatggtagaagcaagaattgcccagcaaaaaggagaaaagcccctttttacaaaatcatcagatcatgtgagaactcactcactattatgagaacaccagcatgaagttaccacccccatgattcaattatctcctacggagtccctcccatgacatgtggagattatgggaatgacaattcaagatgagatttggatggggacacagccaaaccatatcaacatcctacaaagatgtccaaagacaactgtcaaatccaaattgggcatttcagggttagtcacagccactctgggttttattatattccttttgttcctcactctcagccaatccgctttctctttgtcttgtctttgccctagcttttgcctgttaactctagaagttctttgtctctttaaaattggcacctttgatgctttctgctaatcaaaacctgtggccatggtgaccctgtagaaagttggagcactagagctgccctcactggcccagggagtctctgttggtcaggctcatcccctgaaccacttctggacacttccatcccctcttgctcgtacccagcttcctccttatggccttgcagctcaggatccacaacttctgttttttgcttcagttttccccaaggaagcatcttagaaattgtctccttgactctgcacgtaagaggtaccaccctttgcacctcccatggcctttggttacccccagcagagtgtcacttgtcctgctgtgtcctgggggcagctcagcattttgtcctcaggtctgtgacactcctgcagaaatgttgttagatagatctatccttctcccagctgcaagattcaagcacattcctctcctctctgagcctcagtttactcctctgtacaaggagagtgagaagtgctcaagatattgttgccttttcctggggtttctgttattttctgggatttctttttgaatagggttgttgaggattaaatagtttatatatgtaaaacatgtaagagactaccacatgataagtgttcctaaaagaaactatgaacaaatccagtatagcaataagtattttgccaatagccatgttgggtggtatacaaaggggacctatgtaggctggggtgagggttccaggtgggttccttgggctgggaaatgattggaagccacagtttatcttaagggatctgcagcacaaggggagatgaggatggggctgtgccaggaggaaggagcacatgatagactctctgactagacctctctcgggactctcagctacttttcacctcttggactctgctgagctcttggattcctcctgttgaacaggggcaccaagggggtctggaacactaagagaagctctctctttgttcacttgcacttttctgttatattgattcttaatcagccatttttatgctcttatgggaatagcctttgaggtcttctgcaaatgtcccaagtgcaaaacaagatcaaacttcctcttcagatttctttttatcctttcttttttttttagacagagtctcactctattgtcaggctggagtgtggtggcatgatctcagctcactgcaacctccacctcccaggttcaagcaattctcctgcctcagtctcccaagtagctgagactacaggtgcgcaccaccatgcccagctaacttttgtatttttagtagagatgggttttcaccatgttggccaggatggtctctatctcttgacctcatgatccacctgcctcggcctcccaaagtgctgggattacaggcgtgagccactgcacccggccgtcctcagctttctaaattcttcacttgaccttggtctagagaggcaagagtagaaccccatctctcgctgactgcacccttctttcttccacaatgctccaaggtcaaaggggcagtattcatccttaagggaagaataagcccatttcccttcctctttattcctccctctttccaaagaagtatcccacatcctttttccaggaactacaatggttgacaaaactgagatagagtgagagagagagaaactagattatctataaggtgtattaagaagcattgtatttattatttagaagtattatatttattattatagtattattataattcagaagtattatattcattcacacataatagatgtccaataaaaatttgttgaattgcacaatgtggttgaaagagcatggacttgaaattcaggctggtctggttcaagtcttggctttgccacctactaaccatgtgaagtgaagactggcaccatggccatgaacagaaatgaaaattgtttatgccacatcactggagtgattggagcaaattcttttcactgtgctttgtacaggcataaacttaagattttgttttacaaactgatgattatattggctgttaacagagcttaaatcctggcatttagaaacctactttaatacttactcaaagactatctggtcagaaatactccccttttccttcttgaaatgttaaaattcaataggaaagtgacccgttcaaagatgaactctattttataaagatgttttcagtgggccatgggtaaaaaaatatttcataaaccaggggaagccactaaatcaaggagtgaggaaagaaatagacttgctaaagcagtaccatattggtgtgggaaggcgatatattcagtactttttactatatttggctgcaaactcaagacagtttttgccttgatctatgactgagattcagtggcatgggcaccatttgaactaatcctcctcggggcttcttgctctaacaaggagaccataaatgatgacgattgggtgagtattttgaaaaggagagaaggaggtccttttggctgcaaagttctgatggattcatggagctactgaatatgcctattggatcacaggaaacatgcaggtggaacatggattgctaacaatagaaggcaagactgagactaaagtggattcaggaagaaggtgtctctgctgtcaggtggattactttggaaacaggctctgagagagattttgcaggcaggtttataaggaatacacttgggatctgcacctgtggatggaaggagaggaaagcagaagaagacagaggggaaaatacagctttaatgtagcccaaagacaaccccagttgaccccattgggaaatctggtagaatagccttcaaagttgaccccagctgggctaaagtggctgggtttttaaactgtagcacccatcagttgagtccagggtactccatgaaagagtgtggccttgggtgagatggatcacttgggaagctgaggcaattgttgaagaggctgacaggtgaaagatgttgctcaatggtgctcattgaaatgctttttggagaacacatcacagtatccactgagatctttctcaagggctgagaatgccaagtctgtgcatacttggttgcaggtttatatgctaggtttgaagatccaactattaattgattggataaatccttgctatgttagagatttggctaagaagaagcaaagcagttcctttcaatcatccagactgctatggaatctttcccttcctgcaagcatgagtatatagactgggatatcattgttgttgagtgtggactctggaaacagatgaactaccttcaaaacctagctcagcaaccttccagctgtctgaccttggaacaatgacttgacctctcttaactttcattttcttccctgtaaaatgggaataaggacagtatacaatttatatagtgttgcaaagctctttctttgtgcatgcctcacataattagtagtcaataaaagttagcagttgttgttatttgtcctcttagtagtatatcagagaaaaggaaggatttacccatttttttttctaatcctggtgttagcacaaagacagtagaagtcccagcctgggctttgtgggcagaggtcctgttagggtcacaagtgtacttctagagagtctctagggtcagctcctcttgaaatcctggagatgactgaaaccacaaaattagcttctgggttgtctttgcagggtattctacttgattataactataaggcaccttggatcatctcaatgccaggaattatcaatgttaggccctgaagtttcagttatatatgtgtcaattcaatacatggaaccacatgggtgtatctgagtatacttgaatgttaaggaccagtgattctcaaagtaggtccacggaccagtagagacaaagccacttgggattttgctagcaatgcaaagtttcgtggcctcccacagacctacagaaactctgagggtagactccagccatctgtgattctgatgcatgctaatgtctgagaatcaatggtatagataaggggttggtaaattttattgtaaagggccagagagtaaatattttaggctttgcagccaatgtgatctttgctacaactactcaactatgttagtataatgcaaagcagccatagacaataaatgaatgaatggtgtatggctgtgttccaattaaactttattttaccaattaaactttatttaaccaaaactgccaggccacagtttgtcaatttctggaataggcacatgtaggatcataatttactcccttaaggtgattatttctttctctagaatatgttcattcattcatttattcaatcattaatttaatttaatttttccattgtgtgaggatctctgcatgctaggcattctgataagaatcaagagatgcaacaataaatgggacagacaccatccttctatcatagatcttaaagtttaatgctagacacaaaaaggtaattcacaaataactgtcgcaataactgtatgacataaaggatggaattagaggaatgatggggtgaactaatctagtctagggagggtagaaaaaagcctctccaaggaggtatcctttaagatgaagtcctgagggtagtaactaggtgtatattacccttgtacgagctttgtcctcatagctcattttatcctcacacaactcaataaagtggacaatattattattcatggttcacagaggaagaggttgaagcccaagaaggacaaatagtgtgctcccagatttgaacccaggcagtttaggactagaggcagtgtttttaacgacaattctctactaactagttaatgggaaagagaagaacattcaaggcaaagagggcagttcacagtctcgtggggtactcactaatttcatcatttcattttggggagcctgttgtaatctaggcatcatgtttggtactaagcatgcaacaggaaaaaagaaagactttctgcttttatgaaacttacaaatgagtgcagaagacagacattactgaaaactagggggaaaagggcagagggagaatggaaaaggtaagagaatacaacggagtgaagagaaagatctgaggctttaatattgaacagagaaagggtagagagattaacaccaaatctcctttcctcacttcttttgtcaagttatatctctagggcttttgatgattaaatccaattcttgatcaacaatagctggaaaagaagtctctgataaaacatttttacctgtaggcactcaaatggagaactaaaatgaaatgaaacatgtaaacttgaagtcacagttgaattacaggttgacaattgggcactgaatatcagttgaagatataattgctcctctaactgccgtttccaattgcagggcccagttgtgacgactgagctccactaaaatgggaccaagtataatgatatgagtaagttgaaagcaaaaggatgtaaaaagatatacttagcaaatattactcagagattaataagatattctgagagagaatctctgatatctatgagtgtgactcagagataatgcaaggatggctatgttaatatacaaaacaggcttcagagcaaagaaaattactagctacagagagatgtagtacataatgataagtcatggtaatactaaatgtgtatataccaaacaacagagcagaaaacatgtaaagcaaaagctgacagaactgaaaggaaaaagagatgaatccatattatagttgaagattttaacactccctctatttcaacaattggtagaacaactagagaaaatcaccaaagatatagaagaattcaacaacatcatcaaccaacagaatctgatttgatatttatggaatacttcttccaacaacagaatatacattcttttcaagtgtccacaggagaaatatttttattaaaaacttatacaaatttaatataatttttatcattcagagagtgccctctggccataatggaatcaaactagaactctttaacagggagataacagacaaatttgcagaatcttgaaaagtaaacaacacttttaaataatgcatggtcaaagaggaagcctcaagggcaataaaaatacagtaaaataaatggcaatgaaatataacatatcacaatatgtgaatgcagttaaagtagtgcaagagggaaatttatagcactaattgcttactttagaaagaagaaaagtttcaaattaataataaaactcacatttccagagccttaaaaaggggagaaaagtaaatccaagacagtcataagaaaggaaatataagccaggtgtggtggtgcacacctggagccccagctactcaggatgctgaagtggaaggattgcttgagtccaggagtctgaagctacacagtaagttataattttgccactgtacttcagggcaaaagaatgagactctgtttccaaaataaaaaaggaaataataaagataacagcaaaaacaattaaaaatttaaaacaattaaaaaatcgatgaaacaaaaaactggttctttgaaaatatcaacaaaagtgacaaacttctaacaatatttacaaaagaaaaagagagaagacaaaatattgacatcacatatgaagcatatatcacaacagaccccgtagatatcaaaagacatataagaaatgctatgtataatacattacacataaatttcacaacgtagatgaaatggaccaatttctcaaaaagcaccaactaccacaattgatccaatatgaaataaatatttgaatagccctgaaattattaaggagattgaatttgtaatttaaaaacttcccccaaagaaatctccaggcccagatggtttctctgtagaattctatcaaaagtttgaagaagaattaaaacgaatactatatgatctattccagaaagtagaggcagaaggaacattttctgattcatttcattacaccagtataaataaaagaaaactatagagcaaatattcttcgtgaaatgaacacaaatatttttaacaagatattagcaaatataaaaaatatataatacataataatattatataatatgtaataaaaataatacattgtgactaagtggaatttattttagaaacacaaggctgtttaaatattcaaaaatcagtcattgtaattcaccatattaatggactaaagatgaaaaaatcacataattattttgatgatacagtaaaagcatttgacaaaatttaacatttattcaggtaaaatcacagaaaactatgaatagataagaactccctcagctaaattacatatatatatatctataataatctactgttattattatacataatggtgaaatattgaaagtttcttccctaagatcaacactaaggtgaggatgacaactgttaatactgtcctttgacatagtgctgaaagttctaggcactgcaataagacaagaaaggaaattaaaaacatgtagatcagaaaagaagaaataaaagtttcactctttgaaaatgacacaatgtctaatcccaagaaattaacaaaaacttacaatgaataagtgagttccaaagttttcagaatattagatcaatgtgcaaaaatcaactgtatttctatatactaataaccaatatgtagaaatccaaattaaaaatatgatactgcttaacaattgttaaaaatgaagaaatacttaaatatatattgaacaaaatatgtatgggatttttattccgaaaactaaaacactgatgtagtaacctaaaaaggaaattttttgaaatgttgagacataccatattcatgaattggatgacttaacatattaaaaatgaaaattctatacaaattgacaggtttaatgtaatttctatcaaaaccccagccaggcattttgtagatacagataatattattctaaaattcatatggaaaggcaaaaaaaaaacagtatagctaaaacacttgaaagaaaaataaagtgaaagaaaacactctaaccaatttcaagatgtatcatgtagctaagtaattaagactatgtggtattggtagtgggtaggcatcgatggaacagaataaaaaacaaaaaaagtcccatataagttttgtgaactgattttagacaaaaatgcacaagaaattcaatggaggaagggcagtcttttcaacaaatggtgctggagcaattagataatcatatgcaaaagataaatctcaacttaaacctcataccttatgtaaaatttaactcaaatcatatatttaaaagtaaaatataaaactataaaacttttagaaggaaacacaggagaagatcttcaagactgagtggttagtgaggacattttagacatgacaccgaaagcacaaacaatttttaaaaccggttaaaaaaggtaataaatgcaacttcattaaaattagcccaatgaaacagaccaaaattagtctgtgaaaggtccttttaggaggataaaaagacaagctatagactgggagagaacagtatttgcaaaccacttaataaagaactcatgtgaaaaatatttgaagaattctaataactaaatattaaaaaacaatctaattagaaaatgtacaaacaacaggaagaattatttcactgaaaagtgaataacaagcatctcataacgaaagatggttaacgttattagccatgaaggaaatgcaaattaaaacaaaatgaaatatcacaacacacttattagaacagctgaaataaaaaaaagtgaaaataacaaatgctgatgaggatgtacagaaactagatattttaaacactgctggtgaaaatgtaaaatggtaccgccactctggaaaatagtttggcagtttcttaaaaccataccactcagaattacactcctggacacttatcccagaaaaataaaaagttatattcacagggactgttcatgattgttcaaggcagctttatatgtagtaagtcaaactgaaaacaaccaaagtatcctttatgggtgactgactaaacaaactgtttacatttacaccgaagaatactactcaccaataaaaagaaacaaactattgatattcataacaacctggatggccctctggggaattacgctgaatgaagaaagccaatctcaaaacaccatatgctgtactcttgtacttacataacattatttaaatgacaaaattataaaaatggagaacaaattagtagcaaaacaaaaataactatgacgcattggagacatatttgtattaagtatggtcgaaggagaattaccctctatgctacaaaaaacaattcctgcaaacagaaaaggaaaaaaaaatccataattttaaaagttaaatatggacataatttcaaaaagcatagacagcatagagctcacaatatagaaaacaaaaatggctaataaaggtagacagtgtttaatctcagtggtaaccaaagaaatttgaatacaaaatcaatgtgatacagtttgtcaaataaattagcaaagtttataaaaacaacaacattctagggaggttatgatgagacaaaatactttcatccataattactagagtagaaatcagcatacaattgggaaaacaacctgggaaaatatgtcagaaaccttaaaaatatttacaccctcgaccaaatatttgcactttctgacatttattgtaagagcacagcattagtttcttagggatgccatacaaggtaccactaaccagcagacttcaacaacagaaaagaattgtcttgcagttctggaggtttgaagtctgatatcaaggtgtcagcaggatgtgagacagaatctgttccatgcctctcctctagctgctagcggttttctgtcaatctcctgcactccttggcttgtaagtgcatcactcagaattctgccttcattcgcaggaggtgttctccctgtgtgtatatctatctgtgtccaaacttctgctttttataaagataccagtcattggaatagggcccacccatatgacctcatcttgccttaatcatctgcaaagatcctatttccaaataaattctcattcacaggtacaggggattaggatttcaatatctttttgggaggcacaattaaagccataacagacataatctaaaattcaaaacaacaactttattttagtataaaggaattcatgttatttattagtataaaatattaaaaataatacaaatacataacactgtgaaatagtcagatagtgctgggattacaggcgtgagccactgtgcccggccaaagcttgggttttatagacatggacagaatttcctgaagaccttgtttcaatcctacctagtggcttagccacttcccctctctgaacttcagtttatccatatgtgaaatgggaggacaatgcgtgatgctgattccagagaacattttgagggtcaagctgaatctacccctacccttggcagcctctgctacaggtacgtcgtaaccctctgatgtctaagctgttccctcctgcatattcttctaccagtatcctatttctgaaatagtgaagccagtcctattccttcttaattctttctgctttgtttgcaaggttctaactattcaaatttaatttctctacttgcttccattccttgactttcaggatattatttttatttattttcccatggaacgtttgtaagtgttgaatgattttgttatggaattgtgaaattagggaatttagttctggaatggattccccaaaagataatttattcagataattatggcctcactcttcctttgaagaatactagtatttaaatatttaacaatattaattacaatattttatatttatatattgcataatatattattttaataatatttttaaaaataaagtgtatatatgcaattgtggccagaatttgtgaactgttgttgatactcactcaagacattgcagcagcaaaaagattcttagatgtattaatagagggctatgttaattccccactatattttctatttgcctcaggaaacaaattgccatttggcattactattgttttctgagaaagaaaacttctgctaaattaaaggctgcttcacgagctgatcatcttgattcatttagcaatagaagtaggagtcagaggttgcaaaactgttcatcacagtatgggatgagtaatttgaagtctgccgaattgaggaggcatggagtgaggaagagagagggagtaaaagcaagagggtggggggaggagaggaggcagtgggcactgggtgggaaggagtcccaggtgtggagtggcttttctttgcagacaagaaagctaattactataaaaattcctgttgtgtgatctctttgtgaaacaacagcttgatttgaagtctactacattaaaaatgctgcatgtgacttatttctgttctatattttacttgctaatatgtatgtgtgttttaattgatgagaagattgatattcatcccacacttaggtggtcaggaatcccagaggtagaggaggccacaagattctaatgattacaggtacactggaatttggagaaatcttggggaggccacaagctacacaactgggaattcaagaaaatcatgcctatgtctccagggttatgaagcttccagctgacctctggattacataagagcataactaccttctccctctggtaggagcaggaccctggaatgcctctccaccctattctcccttcctcttgggctgcagctgctgtagcaattgtccctagggcctcttttaggagagaggaagcaaagcctccaacctacacgttttaaaggactttttaattgaggaaaggttgcacaatgcaaatgaacaatgggtctcacttccaacctcccccagaaagaagctgctccttgattgacaaaggaaggaaatggaagctagacatttcagaaaccagcactagaataaagagatcaatgtgagacacattgcaggataggaaaaccaaaactatttccaatcactgatccaaggctttcctttcaatctcttacgggaattagcattttagaaaatgaacaaggcagccttgaactacccagagaaatgtgaacttctgagccttctggtcactggacttgtctttggatgaaaagagaagaaataaacgtatattgagtacttgctgtgtgataggctctgtgagaggtgcttcatgaacactatctcatttaataccatttaacaatgtccctatgaagcgtgcataattatctcactatataggtaatggatttgaggctcactaaagtgactatttcagtgaatgtgtcaaatactgctgaagtggcttgcatgtgatcattttgggaagatggtcaggctggtagctactgtattggacagcacacatttatagaacatttccatcattgcagaatgttctattggtcagtattattctagagaaaatataagagcttgaaacagtcccaggcagtagaagagggtatttgcaaaagtgggagatatggtaggagtaaagcaggacattggtgctccaggaattaggcagaggttcataatttagggtcttgaaatgcaatatatggaagatccaaaccagggagtagattagatgatccttcaccgagactcaaggatgatcaagttggaggatattaggtgggcaatgctgctcagtgggtggagcttcagacagactttatgcctgcattttgaaggtcgacatgggaaatatgccatgtagtcatctttgtcccagctgggtaaggaactggtatggttgagccagcactgacctaacagggcagagctgtggcaggaggggttgaaaacagaaaccttcacctcattttatgctcacttgcagaatctgtgagtgagtgtgtgtgtgtgtatgtgtatgtgtgtgtgtgttggaaaggcaaaggcaattaagcatgctttaatccttgactgagtagtttattttcttgcgtatcctgaattccagtttgaactctactgagtgcatcaaattggaattgaaatcttagagaggttttagcatccaaataactctttctcttctctttatctgtgagggtctcctttaaacctgagtccactttgagctttcttatgggataaaaagatgagttggctagggcaataaaacaactttctctttaaatccatgttggaaatgtttacctagcttggtcataattatgcacactactctggactaaatagaaaagaactaagtgatataaaggacttacattccagtaacctctatattagctcagcaataattccagcaaaaatgttttcatcagctcagtttctgttttcagaatcagctcttgagctatctctaagaagcagttaaccactattattgttagcatacaccaaatataattataggtaaaatgcttgaatgagatacttcttgtaggagaaatggagtctctgttaaattcttgaatactatattcatgttggagatttgcaaaaaactttttaacaaaaaaaggctctgagaagtcctgcagtaaagaaacctttttccccttcctgtgtccatgtgttcccattgtttaactcccacctatgagtgagaacatgcggtgcttggttttttgtctttgtgaataaacaaacaaacaaacaaacagaaagaaacctttttaattctatttaagccagaatttcctaaattagctcggaaagttttttattttattttcttgtttgcttttctgctttcttctttgttatgcatgaaacatctggagaataaagctctatacagcatagtttgagaaacactagcataaatacggcagaataatgatatggagtggaggagatgtttgtgtttgggctgtgttttactttcaggaaacctgaaacaatgatgggtatttgggggaagttatagttttcatgagcctgtcatgaaaaatctgagagaaactcttaaaactttgtgattgcttctttaaactattgtccacattttattgttgagcataaactctacactaccttttatttactagttcaatttcaaacattagcaacttaatgatcactgcaggcaaaaatttaccttctgctgtaaccttcagaggtattttattcaatactttgatgaagcttatggtgaactgacatgatttgccaccacattagtttcttaccatctttgtatattatcatggcctcctaatttaccttcatttcttgcaaatcaccttcactgttccctaaaactccaccgtattactatgacaaaggtcatcacagcaagagttgtctacttgaaccacatcatcactctccactggcaacaaggcagtatatacattaaatatgtacaacttttaacatgccagtcatacctcaacgaaccacaaccagtttcttggaatcatttgagcttgtgacccctgtcatgcctttgctagtgccagtccttcctcttgatgagtccttttctcaactcactcatcaaacatctagtcaccctccaggacccagttcaattgtcatgactcctgtggaatatttcttgatatttgcaggaaaagttatttgttcctttttctgtgctcctattgtgggtttttgttttttgtttgtttgtttgtttttgagatggagtctcgctctgtggccaggctggagtgcagtggtgcaatctctgctcactgcaacctgtacctcctgggttcaagtgattctcctgcctcagcctcccgagtatctgggactacaggggcctgccaccacacccgggtaatttttgtatttttagtagagacggggtttcaccatgttggccaggatggtcttgatctcttgacctcgtgatccacctgccttggcctcccaaagtgctgggattacaggcgtgagccaccgtgcctggcctcctattgtgttttctatttattcatacttttggctttgatttttaaggcataataaaaattattggaaaaaaatcctgtgtcaaagagaaacttgaaaaaaaaaactatattgaactccatcttctcttctagctttatttgacaaagttacaccattgccaatatttaaaagtaccacatacattattccccaagcatgaggttatatgtgttacaaacattttctcttcaatccttaaggcaaaagtgaagattttatccctaccctccagatggctttatccaagtttgtctagctccaaagatctgtaaccttttcactatgtaacactgcctctcaggtgcatgactagccatgctgtgtgtcactcagcacacttcatatttataataattgcttttaattctcagataatccttcaaggcaatattagtatccatatttataaccaaggaaagtaagtcttacttgccctaggtcaatatagtagtaaatgttagcttaaaaccctatactttttccggtgtatcacacagcctcagctttccactgttcaggagacagcatcctcgggtttcaaatggacaccaggaagctctattggatctttagtcatgaaagttgattcagaaatcacactcaagggtgcaacgattaaccattaagaacatacagggaaaagaagaacatattaaagaacaccactggctaacacaaacaataaaatccaaacaacctcatttcaactaacatatttcaaggaaaagaaagggagacagttagaggaaggggaaagagagagagggaggaggagggagggaaaggctgtagattaaaagataattaagtgcatgtgtgaccttcattatatgtgggatctaaaatagctaaactcatagaagcagagaatcacatggtggttgccaggtgctgagaggaagaaacagaaagaggttgtcaaagagtacagcatttcagttaggcaaagtaaataagttctggagatctactctacagcctagggtccatagctaacaataatgtatcgtatacttaaaatttgctaagagagtaggtcttatgttacatgtttttaccacatataaaaaatgacaataataaacagggcagaagaaaactttggaaggtaatggacacatctttggccttgatggtggtaatggtttcatgggtgtatacttatctccaaactaatcaagttgtatacattaaatatgcacagttgttaacatgtcagtcatacctcgataaagtgatataagcaaataaattgcaatgtacatatctatttcaatttttattttgattaaacataaattataagaagatcaggaaaaatctgaatactgattgtgtatttgataaaattaattaataattgttcatttgtgggtatgataatgtgattgtgattatgtttaaaaaaggaagtcctagatttatagagataaatattaaaatatctacatatacaataatagatattttggatatgctttcaaacaatctgggacagaggccaatggatagaattccggataaaactaaattggccatgagtctataattcttgatgctggatgttggggttcatttttattattctaaattcaaaccttctaattaaaaaaattaaaaattactaattagccgaacatattcattccttgagaagggttcatagaggctttgaatgttttgttgtcaataaattaagatgtaaaaggagaaaatgtatctttcagccatattcttatccctatagccagattcttgttttaccactcaagagcaattcttttttttttttttttttgagatagagtttcactctcgtcacccaggctggagtgcaatgaggcaatcttggctcactgcaacctctgcctcccgggttcaagcaattctcctgcttcagcctcccaagtagctgggattaaaggcacccgccaccatgcccagctaattttcatatttttagtagagacggggtttcaccatgttgatcaggctagtatcaaactccggacctcaggtgatccacccgccttggcctcccaaagtgctgggattacaggttatgagccactgcacccagccaacagtgattctttaggactacctacttagccataaattggcaaggcaaaaataatcacaagcatttctccttgtgcttcatgttacttgttgtcatggcagcctgtattttgaaaatggatttgaatttgcccctggatgtattaaaatatattaatttttggcatggaatgaattttagttttgtatcatgtcatcagtataaaagattccaggagagaatttatgtttgccaaggtgccattggtgtgataatattaagagtttccatagtaattcttcctactccagtgctaatttgctctcattgagcatatgttgggatttcccagaaggaagaagttagatggaagcagcatgagttggacactgggagggatgaactaggcctgcttcagaaagagagcagtcactttaatcaccaaatccaaggagtaaagcaaagtcacattccatctgggtcaaggttgatgtgtgaggagtgttattgcaggaatgggaaagagtggcaaaggggtttggatcttagcagagtcctctttattctctcagtatcagactcattcaacaaagggtcttattcaagatgtggtagggctgctcaaacaaatgcagggcctgtggagggagagcctggcttggggtcatgatgctttcccgggctacattactcaaagcctcaagagcatgatttgccaacatggccttaccctgggagtgtaataaatgaaagaactggtactggaggccagccaggcaatcaggccttaggcaatatataggcgtttgggaagaaaggactcatatagacacctgagtatgcattctctctcaccactatgcatgttgaccatcatatacaaaatagtaactatttccaaagctttctttcctcataggcagggaggtgctgacaccctcctaaattaggtctccattgccctaggattgggtagggttgtggatgctggtggccagtagtcagtgcctgccactgtgctggtcagggctagggaagttgagtgatgggttttttccaactgcttcttttctggcccatgagaacaacggaaggcagcatgacctggaagatgagatgtggcctctttgccagcacagtttagagctgaacctaaggctaatgctctgggccaatagtcattgacctctaaaaccaaggcttccctgagtcagggagcctcaaattctgcagtctgcactccacactcttcactgtttacttatctgatggagctgttctcttggaaagctgtgttattcctgtaatgcaaagtgacagagaaaataaaaacacccagctgagaaaaagccacaatgttaatgtgaaacacaaactttctgttcatctgaatctcagtttattttaaaacagaaccataacggctcagatcctgaagactgggaagcactgttgctacagctgtcccactctcagatccttctctgacttgccttctggtcttaatccttagcacttttcccaggaaggaatgtcaagtcaaggtggtaagatgtcagattgccctccctgaatatggcttaaagaccaagttaagagcaaattcttaagtttgcagtagatgaaccagaaactagtcaccatatgctccccactaacactgaagtccctctggctgaataaaagcttggcctgagtttcccaggaggtttgttctggatgaatctggcttttgtgttccatctgaaccaagttcggggtctaatcccaaactctcacaagctggcattgagcgacatctgtttggcatcttctataccctgttttcttggtgtttgcctgcattttttggaattagctcaattttcttatttttttttctggatggtttctgaacagtactatccatataagaattttagtcatataaagccctagggagaaccctgctatgtaggctgcttcctgtcctcattccacccccaaactggaaaaacaggagcccatggtggaaaacaaagagaagcagtccaagtattagaagaaaagcaggaaattgtcccataggagagtgtttcatgaagcaaggatgcaacaatacctcaaattacacctctctaagaagaaagtttaaaaagtccctactaagttaagaattagtgaccttaactaagtagggttgtgatggtaaactcagaatgcaataaattaaaaagtgcatgagaatgaagaaaaaggagatactgccttttcaaggtacttgctctggagcaccagttcctaacttggtgtgcacactagactcccctggagaggatttaaaaaatattgatgcctgggcttcatcccggagattctggtttaactagatttaggtctttgagggagcatattttgttttattttatttttaagatgaaaatcacttgacctatttgtagcctaactataagtagctaggagaaagggagaaattaaaagtacaaagggagtggttgggtaatgatgtcatgggatggccaaaaaggcagccgctgggatccaaagttcaggtggttgatcttagacctgaagaggtgaatcaagaccaagggggcaaggtggcttcctttgccaatgtggaccttcatctggtggtttttagttcatgacgttggaggctaagctattttctgagaatcttttttgaccaaaagcagaggatctgatgacatttttggcttgattggccaacacagccttaccttgggagtgtaataaatgatacggggaaacgtcttccctggactttagtatgatcacaaatgctttggtgatggaatggggatagggtgaataataaaagcttactgacagtaaatgatgacttgggaaggaaagactgggcctaataagacatacctgaacccttccatgagaacttctaaaattttagtgacaattcatttaaagagcaattggtcagtcaccttaagttggtcatggcgcgttgtgctggagaggaagagataaacccagactagaacaaaccagtgagctgggaaaaatgagacccaagaaaacagagatgcccctggtggaaaaccatgaagacagtgtggaaagtcaatcagacaaagtctaggggagaggacaaggctggcagtgaggaagtgggtgagttccaggcaactcttgtggccgctgggtcttttctgtggttctgtcacttcctttgtaagtggatgtgacatgagtcttgaagggacagataagaatacctctcaccagggtttatcattattggttcacatctgtcatattcagtagaatatgtattttttaaagaaattaggtttgttttgtataaagattagatgtatacaataaaaatattaagtaataataaaaatcacgaaataaaaaggaagagaatccctctacctctacactatgaatcttgcttcccagaggtaaccaccattaatattttttgggtagggattcttctgtgtgcatgtaggcataggaaaatgatcactcttgtaatatcgatttttaaggctaaaaaccagataaatacataatactgtgataaataagaaaaaagtaaggtgctacaaatgtctaacatagctgcttgggaaactgacaaactcagttttaaatggtatgtataagtggtgaggaaaatacgctaaatgtatatgagtggttctgaggaatagtgaatgaggaatcactattttatagtcatattctctactggtgaagtcatagatagtcatattctctacaggtgaatcaagagggattatcacattttgcagtaataattttacttgctctgaagcaccattgagaatggattgttaaagagataattggtgagcctttacctgtgaatgctgtactcatcaggaaccagcatgcacttgcagaaataaatcaggaattaagttagactaccagtgttgttttttttaaagggtctttaggttggtagctaaagaagaaatataaatggtgttcctcaaattaattgggggcttgaaatgtgatatcatgatattcttgtggacaagatggaggtatacgttctagatagtattgaagttggaaggacttttagctaacagcagtcaaggaatgttataaactaatcaacctcagctgaaagtgagagcagctctatcctaaggtctgtcttattatttgctttattttgactaatttctgggaaaacatatacaatgtctctggtacatagtagatgatcagtaaaaatacttgctgaataatgtgatgtgaaaatgaatgcaggaaaaagtgatcgaaggatgacatgaatttggaaggaacaactagctaataatctgggtgatgcaattaggaaacaaactaacaaacaaaaaacctcttggacaatggcccaggtagatcatccacctgccgtgcagtaggtgaaaagaatgaaagttctcacctgctgcatttgttctttcatttgatttgttctttcatgcaaatctcagcttctgaagcagagagagcaggctggatggctgcaagtccatttcctgagcttttttgttccctggctgtatgctggtgcaacactgcaatgaatttgaaggaaattgcagagttcccccaaatccatcctgtcttgtctggtactcccagagagcaatcatggttagccattaagactgtatcacctttctaccgaacagtctcttcaagaaactgctaacttcttgtggcacccagtttgatgactgtaggaaggagtctccagccccttggcctctggctgcattcctggaaagacactctatctcttagttttctctcccctcaatttattgtcaaaccatgcaaatgaggcttccttaactatttcttggacatcttaaaattaaagtctgcacattaataatttgttcagcttgttggtaaaagtagcatcaatattatgagatcattggtctggcctgggttctctattcaaatcttcatttccaggagctaaggatgcccgccctcctcttttgagtcccacacccatcctctcacatatttatctacttcaattaagagtgggaaatttgttcaagaggagacagtcctgggggacatgaagggaatttttttgtcagggaggcaatgtaaggtctgaactatatggtcatcttgttgagagcagagtctctgcttgcttcattctccatcctttatattcttgttacttaaagtgtagttcacctcacctgggagcttgttggaattgcagaatccctctgctgaatcagactctgcagtttaatcagatcaccagtgatggtgatttgcatgcacattaaccttcagcagcatgggtctgtattacccaacaaagcgtggtgaaggaggaagtaggcagctaacatttattgtgtgagatggcaggagagagaggaaaggaagggaagaaaaaggaaggggaagggagggtaggggagaggaggagaggagagggcagggaagggggggaggaggggatggggagggaatgaaataatataaattcacatggggagaaaacagtctgaatttgtgacaagtatgacataaaattttacttagtttgcatatggtaacacaaacccattgttacaactttctactttagtaataaagtgaatattgtgcaccttaggagaaattactcacatatttacattttactttcttgccttggaaaggtatttttaaaataggttaaatatttccatggttctttgatcaatattttagaaaatggatcataaatagaagaaaagtgaattactccctagttcaggacacgttattaaaaaatccaagttgggccaggcactgtggctcatgcctataatcccagcacttctggaggctgaggtgggaagattgcttgaggtcaggagttaaataccagactgggaaatatttcgtagagaccctatctctacaaaataaataaataaataaataaataaataaataaataaataaataaaaattagccaggcatggtggtgtgagcctatagtcctagttacttgggaggctgaagtgggaggatcatttgagcccaggagtttgaggttacagtgagctatgattgggccaccgtagtctagcctgggtaatagagtgagaccctgtatgttaaaaaaaaaaatcaaattgtggagaacacttgatccattcatagagtaagcatgtttcaaataatatacagttgctctcatgaagctcatggtctagggtaaggaaacaaatctataaacactgttcccccaaacaacatattacagttactatattatatgctattaaaggtaggtaccgaaagacaatttacctttgccaagagtggggaagggactggagaggacaccccagaggatataattgctgaggttcatcttgaggactagattggagtttgccaggtattcagtcacaagacagcagtgtgtgctaaggtcatagagaggacaacatgtcttagggactgaggtgtgtggtgtggctgaaactcaggctttggggaaacaagaggggtgaagggacatgaggttggtgaagtgaacaggagctagatcagaagggccctgaatgctggtctaggcagatgaactcctcctgaaaggaaggtttggatcagtatcttcgttttagaaagataatttgagaggttatgtgtgtgatggatagataagggtggtaatggcaggaggaggagagagggtgatggtgaaggcaggtggagtgaggaagcccagtgaactgggctgttgcatttttaaaataagactacatggtcatggcagattgacttcaggcagtgaccaaccataaagctagaaagaaccatgaacattttagagacattcaggaaggattcagctttattatcctgtgactgccttatttgttgacaaaagttctccaacgatcaaagccccattcctgagatttttggcactggctgtagaaagaacaggaacattagaaagcccagaagctgttttctttcattactatgttttgttttgctcctcaagtaactcttgccattctgtgaagctttacagaaaatcccaagtatcttttaccaccaggataagcttttctctatagcctaagtttaataattcacagttgtgaacacatttaaagagtgaattcccagtcagcatgttcattgtgaattgacatagtttctttaaaggcacatcgtgggtagtgcactacatggagaaagaaatacaggtagggagttgagaagggaggcttgttgaatattttaaagagttgacgggaccccaaaagcctgctttgctaaatctgaacattaaactcagaagcaatgtcgcttggattcctgggaagcatgtgtcctggagggtggggattgggacggtgttgtcaattcttccatttgcattttctcctgactcttcacctccaacctttttgtattcagaaatgcaacctggctcatctttatcctcccagtactccagggtttctaaattgaggatccatagttctctgccgagtcttggaatattttgaaattgaatgcagactccatgtgtacatatgtagctttttgacattttcttggcagagtccttcacattacatgagattctcaaaggcatctgttatgtagcaaagggaaagaatcattgctctacacgttgtggcctatccccagccctgagcaagtgcatcatctccgtctttgtcaggatgaattccaaaaccctctttccagctaatgctattctagtgagctcctaaccactgtctccactgcctgtttggcagctggagacacacagcaatgagcacacccaaaacctgagcttgttaccttcctcctcaaccttgtgctcctcctttgtacatgtggagtaaaatgccctttatttgtttttttaccatctgcagtcaacctgtcattaattcttgataacattacctctgtttttgaaatttactcccttttcttgattctctgttacttagagaacccatccaatctacaggatgtaggagagcccattaataagtgattctagtcttgtctcctatcatcatgccaattcagactccaactgcactatgtatattgttcttcatctctctgactttgtgcaagctgttctctctacctgcaaagatctttcctttatcagatgcttgataatcacatctgtgagactccattcaactatgacgtcttgatgtcttcttgacaattcaagctactcctttcctccatgtgtatgaaatgtttctggcatagtacttaattcagtgagtttatttctctgtttctgtacccatttctccagctgggtactgtggttcagaataatattaaattacacaaattctagagttactcagagtcatggataacaatgcccagtccactaaacagcttattaaaatgcccataacttccaaagttctcccataccttctatacctttgctatgttaatcagtcgtaataaccctttaaaagaaaaccttttaacatattttctgtttatctcaaatatttccttcctttgtcctcaaggttgggcagtaattgggaaaaaaattctattttcctttctttccctgatcccactcaagttgagcaggccctggctccgtgcccacccacctttattccagatgttaccctggcgaacatctaagtctgtaaccaggcaaccattgggaagagggccttcctggctctgggcctagaaacaaaagaaaaacaaataggaggatgtcttgagtcttctacttactttggttttccaatctcatttcccccaaacttttattatttttgtaatggaaactgggggtgggtatctgggctgtctgttcacacaccaaatgtccggtctgttatggagcagggctctggctggatttgatcctattgatcctgatttggggctatgactgccaaggaaaacattcttactccccctctcaccatgttggaaaggaaagcattgaccatgtggccatgcagtgatgaagtttggggcccagctgagacagggctctcaggcaactgaatagcttcatgcagataagactaagcataccaaatgaaatttctgtggccagttagacatcccaaaacatctcttcagtgcacatccctcttgccctctttgccttctgcctagactgttgttaattgttgctgtggtttctttttaactgcatggcttagaattctaatcctgtcttcctgattctgttggagaagtcatcttagacataatagcatgaccccatttaaacccattcagtggctcttcttagcctacagcctaatttcctaaagtctggaattttgtcgttgagaagcataatttattcattcaacacttacttcctgagtacttatcttatgccaggtattgccattcttctaggtactgtggatagtccttgtaatcaaaatacagtaaaacctcacactcctgaagcttgtattctggaggcaaagggagaaaataaattaacaattaaaaaatacagtatgttggatagtgataagtgttatgaaaagcaataaagcaaggagagaggatgcaggtacaagggttgggggagtctgtgaaaatttcctgagaaggtgatagctgagaagagaaaagtagttggtgacagacccaacctagtaggggatatctgtgggagaactttccaggtagagggaagagtaagggcagaggcctggccgtgggagcatgcccgatctatttgagttagaacaagatgtccaatgtggctggagtagaatgatacaaggacagaggaaggagagacgagtttagaacagtggcaaaaggacgtactttatagattctttagaacattatgtggactttgcttgtcacatgcagtgcagtgagaatccatagaagagttttagattttaagaagagcaatcttatgatctaatttacttctagagggatcattcaggctcctatagaaaatttattgtagagaggcaagtggggagatttgttaggcatctattgcaatagtgtggcaaaataatgggggatttcgccagaattagatgtttttgccagtgcctcctctttgatgattttctccaaatagacatcgattttctggctgaatttctctggtcacaggaaacttgctccctactgtacttctttgggtatgctcagatctttagttattccttttacttttactgttcctattactgttccttttacttttcctattcgttttactgagacagagtttgtcttctataggtttctttccttcatcattttggtcctaccccttaagttaattaaaaacaaatctttttcctcccttcgctaccatgccatcttaggcccctcttctccagaatcagtatctccagtccctggctcattcattgcttaccattgtcccagtcacacctctccatcctgagcaccctcctgtgaaggctctttagctgggagagtggtatctttgccaacttggaagtcgggggctacagaaaagcaaaggctatgtagtctggatctttacccttcagtaacacttagtcacagaggtcagaagggtgactgacctctgtgctccagctgattattattattattattagtagtagtagtagtagtagtagggtctacttcatttccaccacctttttttctggggcatagtaagagttaacttctaaacaaactcacactactttgcaagcaacagcaaacacccagtgtaatactgtccttataaaatatgtctttccataatgtgacccaaagcatagagaatatttttactccagcatttcctgccattaatgttttccttttgcaatcttcacatagtgttatgagtgagttgtgtgttacaaaaagctacataaacactctcaccttgtaatctactgtaatggcattagtaaggcagctctgggtttcactcttctttcctaagtgtaacaaacacaaaatttttataccattcagcagtagaggagaaaaatatctcttaagaatgaggtgtaagaggtagacagcgctgtattgaggtggtactgccactctgacagcaactgagtatatgaagtttggcaaaattcccatcccaattggggagctaccaagtcatcacacatgcatttctgttggaatcattttatttctaccctaaatgataatagaacatatggatttggggatagcagagatgaaagccatttcttccttgtaagtttccactgagggattgtactcgccaaagaagtacaaatgcattttagatctacaatcatttatcaattatcaaacacctatcaaaatcatagggttggctctatattatgttggaagaataaaaatatgactcgagaacccgggaaggcggagcttgcagtgagccgagatcccgccactgcactccagcctgggcgacagagcgagactccgtctcaaaaaaaaaaaaaaaaaaaaaaaaaaaaaaaaaaaaaaaaaaaaatatgactcgaacaggcccttgaccttggtggactttaagtgagggagaaataaattatcccagatatttgcaatgctagaaagagatgcaaagctaagatgggtaaagaagaagtagtaattaacaccttgaagactatttagcagttctccaagaatataagtagaaaacatacacgagagctctagggatacagaaagggcatgaagttagtgttaaacaggcctaatcctggtttctggagtctgccctttggcagagacttctgtgttccactgaattgtctgttttccttttcttccttaagaaaaaaaaaatctcaattttatttagaataacactgaccactagaagtcaacattttccaaattcctttgcattttggtgtggtcatgtgactaattattgcctgaagagatgtaagcaaaaaggtgatacggaggattcttaaagagctgacagagctgggaagggcctctattctgcttctttcctgctctctggaatgaagatggtcagaactgaagccctggcagtcattcttgagatgagaggccacatgctaaggatagtagagactaaacatagaagtgtagggttcctgatgggtttgtggtatagttacaacaggcctgtatttctcacctatgaaactcttttacctgagagagaaatgatcttcagtctcatatatgtcattttaccttcagtctttgtgtctagcagtgagcaaactcccaactaatatgttctacttatgcagagcatgaggaccttcacacgggcgtccaatacacatacttcctcctctgctcaccatctcacctaatgggaaaatgcctaatatgaaactggagaaagcttagaatgattaaaaaaaaaaaagcattttaagggaggagagagggcatttgaaagggaaatttcaggaggataatccttttattttgtgaaatatatttttcaagtgagaactgaagaatagtcttgacaagtttagagaagatgtaaaacaattcatattgcccctttcttgatgagtcacttggggtaccatcaaggtcacatggaaagattttataagggttagaatcagtccatttttaagactagcctatcttgggcaatagataatagaggtggcctggttatagggcaaggcatgaaaaactagagagaaacttaatggatgacagagtcattcagatgtcattcattatatttaggctcttatgaaggtcagatggaccaggagggtctgatatcctggaagatatcagtttggtattgcaacactaagtaaaaagcaagtttcataagaggatggccagacaatgggctctgggttcaagtgttaaggagtaacggttaaaaatgatgtacacttctgaagaatggactcgcatttaggtagttgaaattttatgaaagaggagtcttaagtttggcaggcttgaggatagccaatgtttaaatagagtacatgtaaaaaatgacctaagagagattatcaggtaccagctcctcattcagacagctttagtcagaagtagtgtggcctgaggataggttgtggtttctacctgactcattaacttatttaataactttatcaggtatacattttatccattgctaaagacacaatgcaaagatgccaagattgagaacctacaagaggggcatgttgctgagaacctgaaagagggtcgtgctgctgagacagtgcataaggatgctccaacagacctcccaatgtgaaatgaaagtgtcaagccatctttaaaaaggtgagaacctctaggactaaaaaaaggacttgtacaagaattttcataatagcctatttgtgaaagcccaaaacatgataggcaaggtgtccatcggcataaacctgataaacagtctatgggatgtccctacaaggaaagctactcagcagtaaaagactagaactattgctatgtgcaccaacaaggatcaatcttgaaaactatgcttagtgaaagaagctctgcctatgttctttcctggtcagtctctaccttgacaccaccagaggcaataactgttctgtgtccttcactcagcgtgatgtttttgagatttatccgtgctaatactctatgactacatgtttgagtagtttattatttttgtattcctgagtggtactgtatcacataaataatccagagatagtttattaattcttctattgatggacatctaggctatttcgagtgttttgctattatgaataaaactgcaatgaactttattgtataagtctttttgtggacatatgttttcatttaccttaagtaaatatctaagagaccttcgagcacaggacaagtcgtatttaatcctgtaggaaaccactagtccttcctcaaatggtgtaccattttactttactttattttttatttagtttttgttgagcatccgttctctcaatcacttatcctttgagttacaaacaatccaattacactgttattttaaaatgtacaaataagttattattgactatagtcacccaattgtactatcaaatagtaggtcttactcattttttctatattttatacccattaattatctccatttacccctaagccccctgtgcccttcccagcctctagtaactatccttatactctctatgttcgtgagtttaattgttttgatttttagatctcacaaataagtgagaacatgaaatatttatctttccatgcctggcttatttcagttaatgtaatgctctccagtaccatccatgttgttgcaaatgactggatctcattattttttattgctgaatagtactccattgtgtatatgtaccacctttttttaatccattcatctgctgataggcacttaggttgcttccaaatgttaactattgtaaacagtgctgcgcacacataagagggcagatatctctttgatatgcttatttcctttcttttggatatatacccagcacagggattcctggactatatggtagttatattttcagttttttgaggaacctccaaactattctccataatggttgtaccaatttacattcccaccaccagtgtacaaaggtttccttttctccacatcctcaccagcatttgttattgcctctctttccaatataagccattttaactggggtgatataatatctcattggaattttgattagcatttctctgatgatcaatgatgttgagcaacttcccatatgcctgtttgccatttgtatgtcttcttttgagaaatgtatattcaaatcttttgcccagattttttcctatagagttgtttgagctccttatatatcccttgtcagatgtatagcttgcagatattttcttccattctgtgggttgtctcttcactttgttgattgtatcatttgctgtgcagaagctttttaaggtaccactttatgctctcaccaccaatgtatgattgctccacatacttagtaatatttagttctgtcaatctttttgacttttgctgttttggcaagtgtgtggtggtatttcgttgtggagaatactattcttaaatgtatgcattaaaatacacagatttataaagaaaaagcagctatcttgaaaaatatccaagtattttaaatacttgaaatacagaattgtgtatgcttttctatcaatatcaaatgacaagatgtagcatgagacctattaattttatatttttgaagctttaaggagcattcatagaatttcaatacagttgacataactgcattgatatgaaactctctgtggtatctattggtgaccaagcgaaggctattgctaccaccactctgttattcataatagaacgaaatgctaaatttcagataggagtcagtaaaaatgaagttggacattttttcactgaaatttacaaacccaaagactcttgtgcacagtctttaaaaacatttattagagaggatgataaaaataggaactcttggtttctatctaattctgagattctaggctgtttgaagcagccaactctaagataaaggcatcgagtgacttggacagaaaagatggctcaggggcaattatcaaggaagaaggttgttcccagaaggcagacagatggcaaggcagaaagaggcaggactaagggaagatggaagagcaacagcagagatgatgaaggagacaaatctcatgctctaacatagtggtttgccaccatatctgttctttagaatcatctatgacaattttgaaaaatgaaaataagtgtcttggttttactcctagagatttgatccaataatgttggtggggcctggaaaatagcattttaaaaaaagtcattggtagcttaaaggaacattggtggttgagaaccattactgtaaataggaagtttgtgctacggtgcaactgacatgtttgggcgtgaggaacaaaactggtggaacagaaggttagtggagttaaggctgggaagcagatgggtgatagggatggagccagcaagaaactgggagacaggataggaggatgtgcgaggcttatgtgctgtcaggcaggattcttcatagccttaggcagaattcaatctagctgggcactcaagggaggggctgctatcatcttttgttatttgtatgaatagtggtatgagctttacaacaattctaggaggtcaggttagagtgtgagtgccaatggctcacaggttcccaaaggcactggggcagagataaaatcgatcacaatttcagcccatgcgagaaacacttccataaatcacttggtagatgatgaaaacaaataatacgttccatgatgcattcactcttctttgagttgtccatatgttgggttcacgtgacagcaggttgaaggtgacatgagttcagattaagccagacaccattatacatgtctgtgactgaacagccctttctctgttcttgtattcacatttcaattggtcttcttgttcacttctcaaaatattgtagtaatgtagtagaaattaaaagagcttaacatatacttgaactcagtctgctatgttgaaatgagatggcagctgatggagattttaaatagacagagctttcatctctcctttcctcatttatactcagtgccaggtgctaataacgccagtgttcagaagcatccagtttccaatagtggtatctagatttttgtcttcttgttctgtgtcttagttttttggttttttttttaaaattgttgttgctgttgttattgttgtttgcctgaatgtttttgtagaaaccaaaggcatctctgccaactgaactcaataaaaacatacccccatgacaccagattggcctctgaacattgaagcagattaaacattttgctacactctcttatatagtttaaggtcaatggcatgcatatatgttcagttggccctatcttctataatatttaattatattattataaatatagtaagtattataatttttattataatttttaattatagaagatagggccaactgaacatatattttaatataatttggtttgtatagggaaaacttagagataaatgaagataacataaaataatgatagaacgttttgtaataaacagatcagaaaaggtctacatatgagaacattattctcaaaacagtcttcctgagaaactaattatataagactgccattgttcaatagacacctggaactcctttctaggaactgcctctggagctatttggttggttataaattgggctcaggaggcatatggggcctaccatgtgtgctttcttagattcacatggccatatctgcctgccaagctcccagatgcttgcttggtaggaagctccagctgccaccatcagtggcagtgctatcagcctccgcctccgcaggaataagggtggggctcttataagatttcaactgagccttccacagtgagagcctcaggccaagagaaccaataagatagagactatgtcttctctctccacttccaggccaagatgcagtctccaccattgagcataggagtttgctttctctacatccagaggaactaggtgacacaactctggggtatgggagtgttactgcctcgtgggaaaaacttaactaaaaagacacaggagacaggagggagtaacagataattccagatcccttctttctctgttggactattccaaggtgtggccattctttatggcatgtccaggaaaaccctgtatttatcagcaatcagagatgttttcttataaagtggtggccagtttattaaagtataaataccatgtatttgcctttattccttgcccttcccttattcctttgtgcttactgtcttgtgattgcacctcccaaacattagcacataaacttcatgttagttgttttccagggagcctggtccaagactctagactactgaattctcttatttataagactcactcaactcaaagaacaacatttccttggcattgaagagagcaaggagaatatgccagatatgctaaaataaaagtccacagtgtagtttcataatagaaacagtactgaaagcaagatttgtccatctcatgtgttggaaagaagaccacataattttggagttgcatgctctgatctgtttatttacaacaaacaaacaaagatacaaataatctgcaaatttttatctaaaacaatctctcattttcttattctgttagcccaattttccttcatagctcttatgaatatctggtattatattatcttatctctccttgtctcttattcatttactagaatgaaaatccatgtagaggtcttatctgtcatgtttacagattaattcctagcatcttgaacagaagacctaccatctttgaatggcaaggtcagaagaaatttaaaatatttatcttggctgggagtggtggctaatgcctgtaatcctagcactttgggaggccgagatgggcggatcacttgaggtcaggagtttgaaaccagcttggccatcatggtgaaaccccgtctctatcaaaaatacaaaaaacttatctgggcatggtggtgcgtgcctgtaatcccagctactttggtgactgaggaagaattgcttgaacctgggaggcagaggttgcagtgagccgagatcgtgccaccgcacttcagcctggatgacagagtgagactccatctcaaaaaaaaaacaaaattattttaagcattcatttattgattgatttattgattcatggatttaatagacatttattgaatactcatgcaagcggacatgtttcctaaaattccttctacagtaacactacaaaagtgtctgggtatattccttgcacatatttcctgtgactgagagctcactaacctgaacagtatgatgttctggtttcaagcagagctgatattcagttaatgtgcacctaaaaaaaatgaactagttggtaatatagtgaaatgctttcaggtaaataaatagtaaactagtaactgtgagaaactatataattaatttctaatataatttctaatatgcactccttagttcaagttaattgtcaaataggcgtcacaatgacaataattaaatagattttctgacattgagtaatttgactgagtatggatattattgaataaaagagtatctcagaccatgttagaagggttagaaaactttgaaagtaattattagttcagcagaagctgcaagaggcttctacaccatgaatagcctaattttgataaatagaacttgtctatttagtgatcctaaatgtatctaatgatgtcatgacagtagtggccacaacagtatcagttcctgacagcagtgtggacacaggttctgagaaccccatacaacagctgactagataatgtgacattggtgtgaggatgtgtgacccagaccactgctttagagtgacccagagttggctgtgaaattgcaaggaggcatcaaggggcaggcactccagatcctgagtcatgtggaaagtgttgagtcatatggaaagtgctgacatccaggggtgggcctgggtgtaccacgaggtcagtactcagctgccctctggatgcaataaagcctggacatcaataacctaatgattcttgacttcatgggagtcagtggacctgctttacaccatttctatgtcaaaccatggctcacataaggacgtcatttagttagagacccatatccgaaaaaagaccactccggaaatttttaaaaattaacatgtgatttggaaattgttctaatgtttcataaacgttgaacatcatgactcgtatgaatgattatgatgttcagttagtagagtactaaaaattctacctatgcttttgtcagtgttgtaatttcactaatactttttattactatggcaatgctttttaaagttgtttaagactcataataagttgcaaaaatagtgcaaaattcctgtgtaccctttactcaccttcctccattaataatatcacacataaccacagtacagtgtcaaaatgaggaaattaacatagtatcatactgttaacttgattacagaatttgtccagattttaccaggacttacgtgtactcttgtgcgtacatgtatgcgtgtgtgtgtggtttacctctatttttaaggactgtctttccttacaatctctatgccaaggtcatggagttttagccattgctaggcagaggtggagctatacatgactgcgcccccacataatcacattcctttcatttaagaatattcatcccatatggagaaatagaccatgtttattaatcactccagaaagtatgtaatttcattagatcaagctctgtctctgggcattgactaatagagggaacggctccccagcgacccagaacccctacgacacggtctgtggagaccatactttggggccagctgctcaaatgcactgctggaattccaggcagaaatgtgtaatggcatgccaagggctgctgagctgtcatagtccaagcagggttatttgtggcttccaaagagaggctgtaaccttttatggtatccacaaatctcagccttcaagagtcagggagaaaatgcaaccatgctgtttgaccgagctaactctttccccaccttgcccctctcccactcccaccatcactctacccccaaccctgagtagtctgcatagctgtcccagggcaaagaacatggcatgagacattacctttagcattacctcagggccagataaaatggccaggcatcccttctgattcaatgagggaaagtcccagaaagttgttgacaaagtagaaactttctaatttgaggtcctgaacattcattgttctttctgagcaagacagaaaagttttacttattggctggggtacttttaatggcagctgtaggccagggacagtcatgtctacacatgtactctcttatcattgatcaggcccattagaatgccagagctaaagaatatctctcctttgctttgcaggcacatggagaagggtttcctgttgtcccttttgacataaacacagtgcttgaagtatcttttctggcaacttctctgatccacttgtatgtgtattcacttatttcattcaccaggagagtcaaatgagtgaaatggttacaaatggtggctctggaatcagacagacttgggtttcaatactacctctaacacttattggctgtgtggccttcatattaggatagaaagttcacatgttgaacttctaatccccagtacttagaatgtgactttatttggagatagggtctttacagttgtgccctttacagttgttcctaagaacacctaagattggtgtccttaggaaggggtgacattggagacaggtacatataggaagaacaccataataacgcgaactcagagattggggcaatgcttttacaagccaaggaatgccaaagattgtccaaaaatcactggaagctaggaaagaggcccagaacagatcttccccttactaccctcacatggtgccaagccctctgaccttgatcttggacttctagcctccaggactgtgagaaaataaatttctgttgtttaagtcaccacttagtatgtggttctttgttacagcagtcctagcaagccaatatggctagttacccaactttctagaaattcaattttcttattcctcaaatgcaatgactttagcagtgattctcaaagtgtggtccttggacaagcagcatcagcattatccagaaacatgttagaaatgcaaattcataggttcccaccctagatttcctgactcagaaatccttggggtggggctcagaagtctgtttaaaccagctctccggatgattctgatgcatgcttaagtgtgaaaacttacgatattgtagaaaggattctatcaaacaatatatgcaaagttcttagcatagtgcctgacatacagtaagatatgacaaaccacaagacattttcaaacacttatataacacttaaggtggttcagcatatggaggtgtaaagatctataaattttgatttctcaataaactggcagaactcacaactttgggaaaggcatatttgcaacaattaacaaaatgctcttaggtgttatgatattgttccagatgtattttgggaagacagtagacataatggggcagtggaaaatcagggcagaaggtatcaatagatagacaaatgatagctagatatgtttacagatgattgatagagagacataagcataggaggcaacaaaatatgatttatttttattagaataatgtttgctacacaattcttttttctttaaacttgtatttctggctgggcacggtgactcacacctgtaatcccagcactttgggaggctgaggcgggcagatcacaagatcaggagatcgagaccatcctggctaacacggtgaaaccatctctactaaaaatacaaaaaaataaaaaataagccgagcatagtggtgggtgcctgtagtcccagctactcgctactcgctactcgggaggctgaggcagggcaatggcgtgaacctgggaggcagagttttcagtgagccgagattgcaccactgcactctagcctgggcgacagagagagactcccatctcaaaaaaaagaaaaaaacaaaaacaaaaaaaaatatgtatttctaaattgattctcacaacagatctgtgggaaaaaacactataaggagaataaaaataacacccagctattagggaaatactatcaatatttaacatattattgttaggaagattaaattataccatgcatgtaatatgttcagaacagaggtaggcacatagtttgccctcacgaaatcaaacctcattatcattattattattacattgttttcattgttcaaatatagaatgaaatttcagaggggacatcactggttaaataaagatccttgtttcaagtcctgtactaatggtttccatccttggctatttccgctgtgttgtgccatctctcacatgagatattgtaagcttctcttagccccatcacagtcctatgattgccctactaaaatgtctgcccctgaaacttgtggatccttttcaaacactatactgggatatcccacctcattgctcagtggcagcctgttctgatgtccagtgtccaaaaaaacagaaggtcaagccctacggttatgaaacagagacactgggagaaatctagattccatgcaagggtgacactgaccaaatgtagtcttttctctatggcgtaaatgctaagaatgagagagtgagttacttaggtgttgggagcaagccccccaaaatctggccataaactggccccaaaactggccataaacaaaatctctgcagcactgtgacatgttcatgatggccataaagcttatgctggaaggttgtgggtttaccccacaatgagggcaaggaacacctggcccgcccagggcagaaaactgcttaaaggcattcttaagccataaacaatagcgtgagtgatctttgccttaaggacatgctcctgctgcagttaactagcccaacctgttcctttaattcggcccatcccttcatttcccataagggatacttttagttaatctaatatctatagaaacaatgctaatgactggcttgctgttaataaatacgtgggtaaatctctgtttggggctctcagctctgaaggctgtgagacccctgatttcccacttcacacatctatatttctgtgtgtgtgtgtgtgtctttaattcctctagcgctgctgggttagggtctcccctaccgagctggtctcagcaagtggctccattcatggggactcaaatccaggtcaaagggttgtcagagcaatagtgggaacagaaaactagctggaggacacccgagtactcttaaagcaatccccgtggtgagtaggaaggggagctcagaagcatcagggtaacaatgggacaggtgtggggtctggttcatttcaccttggatctttttcacactgatgatgaggaggaacgagagtacagtgaagtaatagaagaggttacagagcatgtttatttgccagctaaagctaaagtggcaaaggagggagaggtgcatccctacccttctgcaccccctcattattattttgaagaaaaagaccctccagatctttcttttccagaggacactgggcaaaaagtagttgtcccagtgactgtttaagcagcgcctcgagtgactgctcttagctctattcaggcaggaattcagcaagctagatgagagggttatttacaggcttggcagttccctgttagaatacaccccccagatcaaaagggaaatattatagctacatttgagccttttccttttaaattactcaaagaatttaaacaagctataaatcagtatggaccaggttctccttttgtaatgggactgttaaagaatgttgctgtttccagtcggatgattcctactgactgggacgctcttacttgagcttgtctaactcctgctccattcttacaattaaagtataaaaacaaacaaacaaacaaaaaacaaaaacaaaaacaaaaaaacttggtggggagatgaagcttccattcaggctgcttgcaatgcccaggcccaacctcaaattaatgtaactgcagaccaactttttggggttggtggatgggctggtttagatgcacaactggtcatacaggatgatgccatagaacagcttagaggagtgtgcattagagcttgggaaaaaatcacttcaggtggagaacaatacccttcctttagtgctataaaacagggaccaaaagaaccatacattgattttatagctcggttacaggagtctcttaaaaagatgattgcagattcggctgctcaggatatagtgttgcagttattagctttcgacaatgctaatcccgattgccaggctgctctgcgacctatcagagggaaagcacatttagttgattgtatcaaggcctgtgatgatattggaggtaatctgcataaagctactctgctagtacaggccatggcaggactgagagtggataagggaaatactccatttcctggagcttgttttaactgtgggaagcatggtcatactaaaaaagaatgtagaaaaattctgcgagtcaggccaccagataggggaaaaaaaagaaaactgttgagcctgaaatatgtccaaaatgtaaaaaaggaaaacactgggctagtcagtgtcactctaagtttgataaagatgggaacccgatttcgggaaatgccacgaggggcctgtcccgggccccattctaaactggggcatttccagctcaggccattccctcacccctgtacaatgtctgtcccccaccacagccagtagtgccgcagtagatttatgctgcacaaaagctgtgagccttctgcctggggaacccccgcaaaagatcccaacaggagtctgtggatccttgccagcagggacaataggattacttttaggaaagtctactttaagtttaaaaggcatacaaatacatacaggagtcattgattcagattataatggggaaattcaaattgttatatctacttctgttccctggaaagcagagccaggagagcgcatagcacagctcctgactgtgcaatgtgtgggaataggaaaaagtgaaattaaatgaacaagaggatttggaagcacaaataaacaaggcaaagcagcttattgggtaaatcaaattactgataaacgtcttacctgtgacataactatgcagggaaagaaatttaaaggtttggtagatacaggagtggacatttcaatcatttctctacagcactggccatccgcgtggccaattcaacctgctcaatttaacatagttggaattggtaaagcccctgaagtgggatcaaagtagttatattttgcattgcgaagggcccgatgggcaatctgggactattcaaccaattataacttctgtacctacaaatttatggggaagagatttattacaacaatggggagcacaagttctaattccagaacaattatatagccctcaaagtcaacatacaatgcatgaaatggggtatgtccctgttatgggactagaaaaaatttgcaaggtttaaaaagttcctgccaaagattaggatatcatttttgatggcagccattgttaagcctccagaacctatacctttaaaatggttagcagataagctaatttggatagagcaatggccgctaagtaaagagaaactggaggctttaggtattagttactgaacaatcagaaaatgggcacatagctccaacattttccccttggaattctccagtttttgtaattaagaaaaaaatcaggtaaatggagaatgttaactgacctaagagccatcagttcagttatacaacctatgggagtattacagccaggattgccttctcctgctataattccaaaaaattggcctttaatagtcatagatttaaaagactgtttctttactacccctttagctgagcaaaattgtaaatggtttgcatttacaattcctgcagtaaacaacctgcagcctgctaagcgttttcattgttttacagatgggtctagtaatggtaaagcttcttattttggctcaaaaagtaaagttttccagacatcctatacttcagctcaaaaagcagagcttgtagcggtaattgaggtattgactgcttttgatatgcctattaatgtgatttctgattcttcatacatggtttattccacacagttaattgaaaatgctcagttacgatttcatacagatgaacaactgatgactttatttacccaattgcaaacagcatttaggagtacaatgcatcctttttacatcactcacattagggctcatacacctcttccaggacctttgactgaagggaatcaaatggccgatcgcctagttgctaatgcaatatctaatgctagacactttcacaatttaacccatgttaatgcctctggtctcaaacgcagatacaacattacctggaaagaagctaaagctattatccagtgatgcccaacttgccaaatggtacattcctcatcttttacaggaggagttaatcctcaaggattggaacctaactgtctttggcaaatggatgtcacacatgttccttcatttgggagactagcttatgtacatgtatgtgtggacaccttttctcactttgtctgggctacatgccaaacaggagagtcttctgccagtgttaaacatcaccttttgcagtgttttgcggtgaagggcattccagcttctattaaaacagatgatgccccaggttatgctagccaagccctagctacatttttctctatgtagaatattaaacacattactggtatcccatacaattctcaaggaccagccatagtagaaagaatgaatctctccctaaaacagcagttgcaacagcagaaaaggggagacagagagtatgggaccccacagatacaactgaacctagcattattaactttaaattttttgagcctgcccaaaggatagatgttatcagcagctgaacagcatctacagaaaccagctgcaaagacagaagcagaacaactgatttggtggagagatctgattacaaaaacttaggaaataggtaaaataataacttggggtagaggttatgcttgtatttctccaggcaaaaatcaacagctgatttggataccaccaagacacctgaaaccttattatgagccagatgccaaggaagagattccgggaggatcccgagtactccccggttgcagccatgtcaagactgatgctgaggaggaccccaactgtcacaaacaacacatgtcaaacacagccactcatctggggacagatcaagaagctgccacagatggcggaagaaaacctgaggaaagtgggacaaccagtcacaacaagtaatttaatggtagctatgatagcagttatcaccgctgctgtgagtattccttcaataaggactgacacagagaacgattatacttattgggtatatttatcaatcttggctggcaacaatgcctggatgcaatcactctatgtcacagttacacatgctttctgatctcagtatttaccataataaatctgctcctataattgaggcataccgccctcaaaaacctatttgtaaacaggattggacccagttagaaaaaatgaacgtacttgtttaggaagattgcattgcagaacaggcagaggtgctgcacaacaattcctatggaatcattattaactggtcccctaaggggatgtttagcttgaattgctcctctcagtccgcgtcccacggtcatgctatgttcagataatctgaacaaaacggtcagatggtagaaataatagaagtatggcaagagttcctattatctggaaccatgtcggtatagtggcacctcaacctcaaatgatatggcccactctaggagcttaacataaggatttgtggaaactattaaatgcacttaatgagatcaaaatttggaaaagaataaaaaagcatctagaaggacactctacaaacttgtctttggatattgcaaaattaaagaacaaatatttaaagtatcccaggcacacctgaccttaatgccaggaactggagtccttaaaggagctgcagacagattagcagccagtaacccaataaaaacacttggaagctctgtgatttcaatgatgattgtgcttttaatctatgttgtttgtctttatgtagtctgcagatgtggatcctgactcctgcaagaagtagctcaccatgacaaagctgcccttgcttttattgatttgcaaatcaaataagggggacatgttgggagcaagccccccaaaatctggccataaactggccccaaaactggccataaacaaaatctctgcagcactgtgacatgttcatgatggccataaagcttatgctggaaggttgtgggtttacctcacaatgagggcaaggaacacctggcccgcccagggcagaaaactgcttaaaggcattcttaagccacaaacaatagcatgagtgatctgtgccttaaggacatgctcctgctgcagttaactagcccaacctgttcctttaattcggcccatcccttcatttcccataaaggatacttttagttaatttaatatctatagaaacaatgctaatgactggcttgctgttaataaatatgtgggtaaatctctgttcggggctctcagctctgaaggctgtgagacccctgatctcccagttcacacctctgtatttctgtgtgtgtgtctttaattcctctagtgccgctgagttagggtatccctaaccaagctggtttcgacatttagggaacctggtcatggctgggtatggcatgaccatgagctttgaaggggtgtaaaaacctagcacttattcttacctcttttgggtctttgaacctatatttatggtaatgctggctagtgttaacagatacattatctgtgttctatcatggtatatgtatatgtcccatccacatcaagttaaattggtgaagaggtctgcatctagttactaagcatcccaggctgccatgggattttatgatttttaggatgtggattccaagggtgctctgtgtgtgaatattcacccaccagatgaagaaagagaaggatagataacctcataggagttttataggctaagctgaaagagatctgcattaatggcctaaattttattaacgagaactggaagcacctaattgctaaggaaggtgagggatgtaatctacccgtgtgcctaagaagaaagggagctagatttcaggaatgcttagcagcctttgccgtagacctcattgagaaaggaaagaaagaccctatatccacccactacccatccccccaaaatatacaaacagcaagacatatgagaaaaatgctggtcattttggagttttacatcatccttcaagccacagtccctaggataaaaaccactgatattccagtttcttagagaaaaggatcagatcctaagtgatggatatttgccaacatcatttgaaagcctctttagccataagcagtacttagttgcagagactgagaattcatctttgggaagataagggagggaattgctactggcatcacctacatatggctgccacctgctcagcatctccagggcttacccagggatatcattgctataaggatacttgaaaaggtgaaaacaactttggaactggataacaggcagaggttggaagagtttggagagctcagaagacatgaagatgagagaaagtttggaacttcttagagactcgttaaatgattgtgaccaaaatgctgaaagtgatatggacagtggagtccaggctgatgaggtctcagatggaaatgaggaacttactggggactagagcaaatgtcacgtgttatgccatagcaaataacttggctataaagtgcccttgctctaggaatctttgtaagtttgaactttatattggtgagttaggttatctggcagaagaaatttctaagtagcaaagtgttcaagacttgacctggctgcttctaacaacttatgctcatatgtgggagtgaatgaatgatctaaagttggaacttaaaagggaagcagagcacaaaagtttggaagatttgaagcctggacatgtggcagagaaagaaaaagatttttcaggagaggaattcaagcaggctgtggagcaaccacttggtagataaatttccataactaacagggagccaagtatggatagccaagacaagggaaaaagacactgaaggcatttcagagaccttcagtgaagccattcccaacacaggcagagaggcctcttggaaggaagaagggtttcatgggtttggtccagggccctgctgccctgtgcagccttgggacattgttccccacatccaggctgttctagctccagccttgtctcagaggacccctggtactgctctggccactgtttcagaaggcacaagccaaaagcctggaagctcccatgtgtcgttaagcctatgagtgcacagagtgcaagaatgagtgaggcttgggaacttctgcctagatttcagaggatgtatgggaaagcctgagtgcccaggcaaaagcctactacagaaaacctcgcaaaaaacctctaccagggcagtgtggagggggaaatgtagggttagaacccccacacaaagtccccactggggcactgcctggtggagctgtgggaagggagtcactgacctccagaccccagaatggtagatacactggtagcttgcaccctacacatgaaaaagctgcaggcactaagcaacccgtgagagcagtcaaccggagtggagctgtccagggctttgggaatgcaccccttgtacctctgtgctgtgcatgtgggaaatgtagtcaaagagcttattttggaactttaagatttaatgattgccctgttggattttgaacttgtgtggggcctgtagcccctttctttttgacctatgtctcccttttggaatgggaatatttacctagtgattatacttgcatgataaaatatcctaggagtcaaataacttgtttttgattttagaggttcatagatggaaaggacttgcctcatctcaaatgagactttggacttttgagttaatgctggaatgagttaagactttggaggactgttgagaaggcataattatactttgcaatgtaagaaggacatgagatttgggaggggccagggatggaataatataatgtgaatatttgttaccacccaaatctcattatggaattataatcctagtgatggtggggcctggtgggagatgtttggataatgggggaaggtccctcatggtttggtgctgtctttgtgatagtgagttctcatgagatcgaataatttcaaatgtgtggcccctcccctgtctctctctctctctcccccaccccccacttgctcctgcttttttcatgtgacttgcgtgctccctcatcatcttttgccacaactgtaagtttcctgaggccttccaagaaattgagcagatgccagcgctatgcttcctgtaaagcctacaaaactgtgagccaattaaacctctttttttaaataaattactcagtctctcgtatttctttatattgtagtaatgcaaaaatggcctaacacttttatgttttcacttcatttgtgtagttaattggttgtaaggtaagcatgtagtttaatttacaggaaaatatccaaatattttccaaagcaggcatataatttctcatcccagtaatcaaaacgtaagttctagtaactgtatctttgccaagatttagtattgtctttcttctcctgcctccatattctcagaggtatgtagtggtatctcattatggttttaatttgcattatcctaatgattaataatatagagcatcattgcacacttacttgccatttgcatatcatcgttggttaaatatcagcctaaatcttttgctcacttaaaaatttgttatctttttaaagagttctttatatattctggatacaagtaccttattagattaatgtgtttgaaagtatcttctcctattttgtggcttgtttttcattattgtaacagggtcttatgaagagcagaagttcttatttttaattaaagtcctatttatcattttttccttttaatggctgtgcttttagtgttgtatctaaaatgtctttgcctaactcaatatcacaaagattatctcctatttttttcctagaagttctatgagtagaggttttaggtttacatctataatatattctcaattaattttttgccggtggtgcaaagtatggattacaatttatatatttttggatatgatgcaatttttccatgggtgcgttacctttttcattttgttagttttgtacctttgtttaaaaacatcaattgtcaatatatgtatgggtcttggtctgacttacttgtgatccattaatttatgagtatattatttcattgataatacaatgtcctggttattgtagctttatagtaagtcttaaaattagcctgtatgagtactgcaattttgaccttttttctaaaattattttggttattatattctctttgcattaccatgtaaattttagaatcatcttgtcaatttttacaaaataccttgctgtgattttgattgagattgtactgaatataaagattgtgagatgggcaattgacatcttaataccactgagtcatccagtctattaacataataggtctcatttatataggtattctttgacttctttggtcagtattttgtagtttccagtgtacagatcttgtatatattttgtcagctttaacctcaattttttatgttttagggacattttttcttttttcaactttaatttctaattttaattcccaaatgttcatcgctgcaatacagaaacataattgatttttgtacatttaatttgaccatgaaaacttgctaaactcatttattagttttggtatgttttatgtagcatatttgggattttctgagtagacaaacatactgtctgaaaatatgacagttttatctgtttcttaccaaaatttatagtttctattttttcttgtgctctagtgtgaatttgaataggagtggagaaagcatgcatccttgtcttttgcctaattttagtggaaaaactataggtatttgtagcctctctaaattatgttgagaaggtttccatttggttttagtttgctgagttaaaaaaaatcaattatagattttgaatatgtggaaaactttttcctgcttatattaagaaactcatattgttttccttatttaatctgttcatataataaatttcatcatttctgtgatgagccttactcggttgttttgtattatctcctttttatattgccagattctacgtgtaatttttttgaggatttttaaatgtatgttcacaagaaatgtttttctgtgattttcctttcttagaatgcttttgtatggctttggtagtattagggtaatgctggcctcataaaatgaattggggagtgttatctccacttctattttctaaaagagatttgtggaattggcattatttattctttaagtgtttgatagaattttccagtgaaatcatctggtcctaaagttttctttcttggaagatttatagttattaattaattatttcaattgatttaggactattcagtttatctatttctcctggaatgaactttagtagtttgtatcttttaacgaattttaccatttcatttatttatagacataagttgtttttaatattcccacattattttatatgtagaatttatactgatatcccttttatattccttatatttgtcttttgcatcttctctttttttgtttttatttaacttctggccagaaatttatcgattttattgactttcgcacagtcagcttttggtttaattaattttctttattgtttttggtttgcaattgcattagtttctgctcttatatagtcagtaaaaatttaataaaattttatttccactgatttatattcttttgcttttttcaacactgatttacattaaaaactccaagcacactataactgaggggaacttccttgacataatgcatctacaaaaatgctaaagccaatattatacttaatggtgaaaaattgggtgcttcctccaatttctcaagaagtcaagaagtaggcaaggatatcctttctcaccattcctattcaatgtgatactcaaaattctagctagtgcaataagataagaaaaggaaataagtatccgcagattggaaatgaaaacataaaatggtttgaagatgacatggttgtctgtacagaaaatccaaaggatttgacaaataaactcctggaacagataaatgattatagtgaggttttaggatataaggcatattagtttctagggcttctttaacaaattaccacaaactgcatggctaaaaaaaacagaaatttgttttcctattattgtgaaggctaggagcctgaaatcaaggtgttggcagtgctgtgttctctccaaacacttcaaagaagattccttctttgactcttcctagcttcttgtggttacaaacaattcttgacactccttgatttatagatgcatctctccattttttgcctccagtcttcacatgatgctcttctctggtgtgactgtttcttcacctggctttcttataacaggtaccagtaattggatgtacagctcatcctaatccagtgtgaacacatcgtaacttaactaattacatctgaaaatacctattttcaaataaggtgacatccacaggtaccagggctaggacttgaacatatctttttgaagaaattcacagtaggactccccaaattcatgtccttctcatgtgcaaaatacactcaccctgtcccaacatctcccaaagtcctaacccatttcaacatcaattcaaagtccaaaatctcataaaatattctcaactaaaaatgttccaaatctcaccatgaaaatcatccacatttggtatgatctgagtatgatccatcctggggcactattcttttttatctgtgggcctgtgaaactggaaaacaagccatttcatttcaaatacagtagtgagagagacacatgatagacattcccatttcaaaggaagacattggaagaaataaaggggtcacaagtttcaaggaagtccaaagcctattagaaaaaaatctattagactgtaaagttggagaatcattttctttgactttattctgtgtcctataggctgagggcaggtagagctcttttcttagcagccggggaagcaactccatcctctaggctctgggcttccagagactgttggcaccagctccactcttttggcccccagctagataaaagtagccagtctgaaaagcctacatagtatataatgctaattatacaacattctggaaaatataagattatagaggctgtaaagggatcaaggaaaagggagaaataaatatgtgaagcataggaaaattttagggcaaagaaattattatttataatcctgcaataaggcctgttttcaaaattgatagaattttacagcacaaagaaagaaccttaatatatgcaatttaaaaattatttagtaagttggaggattccacaaagaaatgcagactatggctagagaatctaactgtactacaaaagcaggaggctgataaattattcatttttgtaactttagaaatgagtggagttggtaagactaacggcaaatgtagctgcacataagcattgtactctagttcatagaggtctttcccacacgggtatgtcttagcaattctagtactgccatacatcttaatactgctatacttaatagtggaactagtaagtaataagtggaagatgatggagccaggtttctgactgttggagtggaaatttacagattagaaagggaaggaggctagaataatctatgtgataatggattagcattagaaacaacagtaatatagaatagatgattttatatatataaattattcatagatacgtgtatatacaccatttacacacacacacacacccctacacctttttctctgtcagctgatagagcctaagaaaagtaacacctcagtggcaatgagctcccaagcacctaaatcttgatttctaataccattccctgctctctgccctaaaaaaaaaacaccaaaattctttggaaaaatggctgattctagaactgagacagggaatatacaagatgagcctggagcaacttgtaatgccagaaactggaagtactcaacgaacaagcaaacaaaccccacattgatgggagtatgcaacaaacaaacaaacaaacacaaaaaacaaataaacaacaagacaaaacacagaagctaactgaaagagctaccaatggtcaatgctaaagcaaattgagaaaaaaagaagttgtattagattctaacccaaagtataaaataagtatctgagtctatactgatatgaatacgtggttgagtaaattattgagtaaataaatgcaggagaatagacaaatctctcatgtagaagaatcccaaataattcacatagatactccaccctctggaaagtgaagggcttgaatgcttaaaaatccatacattgaaatccgaacccccagtacttcaaaatgtgaattgatttgaagatagggtttttacagaggcaatcaagttaaaatgaggtcattagtgtgggtcctaatctgaaatgaccagtaccttataagaagaagaaattttaacacagacatagacaaaaaagaagacaatctgaagacacagggagaagaagataatctacaagtcaaggagagaagcctgtagcaggcatttcccttacatctctcagagggaaacaaccctgctgtcagcttgatcttttagcttccagaactgtgaggaaaaacattctgttaagtcacccagtctgtggtcctttgtaaaagcagctttagcacaggaatgcaaggtggaagatctgggtggaatttattttctttctgacaacagtggatccttcctttactggcaaggcctgtgctacaaaggatggtttctggagtatcctgcctgcctcattctttcctgttaacatgcagtaaggcctttgcaaaataccccatgagtcagtgcaaactgccttcatgtatactgctcatatataccagttttctgtactctcatactagttctcagttttgagcagttacttgttaaaaattttagcaatttgttgaaaaaaattagcttcttaccccgcttgtatggcagccctgttttcctcacatgctctgtcccagaaaaaaaaaatgacatgttttatctctccttggaggcacctgaaatttcaaactagttgattgctctgtgaccccagatctttgatatattcaggaaaaaatcataattatgtaaagtatccaatttttttttttggtttgtaaactgggagcaatcctcttttcataacctaagaagaagccagaaatgtctgcatttcaacaaccattagagatttcgttcttccaagaatgcctttcttctaatctgtttcctggtgtaaagtacccagcttttaatagatgcttaattaacaatttataatattagcattcttatgcttatcacctatgatgtctccccaacatgtctggggccagggcatgaattccacaaggaaatcattgacttccagatcaatgacatcttttccagaaatctgcattacagccatgaagttcatgccaacagagctcctgggaagacatacccattggccacattttaagagccagcaaacacattatttgccaagcacacaaacccactataactgatgagggtgatggtttggagcatgagctataacgttggggagatgtggttagtcttgacccctacctctgcctcttgtgaattacatgacctcagacaaatcctgtaaccccctgtgctcagtttctttataaaattgtgctgataatgatggtatccaacccctatgcctggctcatcataggtgattcagagctactagctatttatttagtcattttatcttaaaatcttggcacattgttgcctggatgtcattgtctccagtgcatggagtggccagacccctggccctgccttttctctttttccctgggcagatggagctggttttcctttctggcacacactccacagaggaacttgggaaaggaacaaagactgaagaacaaatcagcctattttccactttttaaaagtagctctgtcagaaggttgagtggaggaggagtttgcagccattggctaaagagggggttctctttcctgtctgtagctttccattcattctcctgtccattacaccacgctggccttgctagtccagggacatcggccccccccacctccagtggtctctcccctgtgtcaatgactcagtttttgcctagagttcccacagctctagggaagagaggtgaggctggagtaaggcaaagccagaggggagcctgaccctgggggcgggggttggtggggcagaggggggcgtcctgcagttgcagttgatgagtgagttcttggtcctgacaggacagatgaggccctttgttcctgcaaatgggcctttcctggcagtgatggagatcgcctgcagtccagcccgctcctcctcttcagctgcagccattatcctaaagtggttttattgatctgctgactccctgtctcctgcctgctctccctttcctcctcccttccccaccccctgcaccccatcctcaagctcctaaatgctctgttgctggcctcatccatgcaaggctgttttttcaggggtgaaggatgattttgaagttagattagacaactgcacttgcctcatgagaaagcagatattcccttagggcaagcattttcagactagcaaaggatatacctccatttaccaaccacaccttttctggatgtagttctttggttgttttgactttttgtaagatgtaggaaatatagatgctatgaaagttcagtttcaaagtttgcaccttggcaaactatagtacattttacaatgtcatgataatgccgcattttaaacaattaccagtcatattcatcttaatacaatttacatgtaattaaagaaatttttaaatcatttagcatttttgcttaagacttagttataagctccataaagttatgtattcttattttatttataacaaccctgtaagataactgtcataatccttatttacaggtgtagaaaaataaatgacttgaaagtcgtaaatctaacaaataccatagacaggactcaaagctaagcccattggacataaaaacttctttgtatttatatgaaagtctgtatttttgatgctgcttaaaatgttaggcacacatctgattaaaaagctgtgctctattacaggtgtgttatgttcgatattacccatgaaactctagcagtcttcattgttaaagagggagtgacccaggtgttaaattacctgagagctggcccatgatcgtcatactatgagcatagtcatacatgctcaggagaatttttaactgagatgtccccatttagctctcgtgtggcttttacagttgtttaaaacattttgagagaatttggagctggtgttcctcaataaaaacatgaaacctggaaagtaatttaagcctctacccaaagttcatgaataaaacttactaagaatctttcttggctaggtgtggtggcttacgctggtaatcccagcactttgggagggattacctgaggtcaggagttcgagaccagccttgccaacatggtgaaaccccatttctactaaaagtacaaaaattagcccggcatgatggtaggcgcctgtaatcccagctacttgggaggctgaggcaggagaattgcttgaacccgggaggcagaggttgcagtgagccaagactgtgccattgcactccagcctggacaacaagagcaaaactcagtctcaaaaacaaacaaaaaaacaatcaaaaacaaaagaaaacaacaacaaacccaaaaacaaaaacactttcctcctagtgagatatgggaccagaacacagatgtggaaacccatgggttcttatacctgaacacttggtgtcagcgtaggtcagtagcaacaatacagagttaagaggcaccagaaaccaagatgctgtcatgacctttaattaaacttacgatcatcttatgtgcctgtatgaaaggcacatttaggagagatgtatgtaccttccatgggcctagaatgaattactgccttgttagaataagagtgaggggaggtctctggaagaatcagattctggttattagtggaggcagtagaatagagcatcagtgagacaatccctatacataattattatttattactattgaacaatactatctgctgtgcaccaatccggttcactgccatatataacattgacatgctcttggccctgccaaatcaataccttctgttgcagactatagagatgacttttgtcctttatctgcccccacaccccattttcaaagtgggagatgtttagaacaagatataattttcactatctctattttaaggctagcacctggagatgctccttgctgtacagtaaagtgtgactgtattttgttttccattgacttacattataaaattggtaatgtgttttcattagaaaaagaatatcataattttaattgaatatttgatatggaaaagtgagtggagaggaatgagagcatgtaggactgggaatgaggatgcctgggattcagttctaaaactgtcactgcataactaggaaactgggcttttgtcatgattttgcctctgtgaaagctgggatgagtccgaaagctttgagcctcagtttcttcatctgtataatgacaggctggggctaaatcagggacatcaaatatgtatcacatatactgtcacttgtgatttctatgcctatagcagacattactaatcaaaagcagttttctttctgataaagccaaaatacagtcccaggccacccataaatgagggcaatgttctgataagagttaaaacctaaaatgcttgaattctatgctcacgcaggtcctttccagcccagacaccccagatcctgaattagtggtcagcctcctgcagttttatgccaggagcttcccatatattaaactaatctttcaaaaaactccctcaattcatttcaaagaggaaagtcatggatacatttcagaaagaaggttatttatgcaagacaaaaatattattatgaaaaaactgaattgttttttctaaagcaaacttcagccaatgctgcacttgttttggatctattcaattttggtctccttttcctttctgtcttgagcagctctcacattctctttctccctggactttcatgaatttattcctaataaaaatttataattgtggcactacctacgttcttgtcactttgggggcttgttggccatataccttgtacaaataatctctatcatttattgcttcttcagagaagatgttatacatgtgcagacacataaatgcaaagtgaaaagaagcagtcagtagatgataccaagcatcaattcttctgttatattattctgaaactgaatacagaatagctgggtatctctattgaatgtttaactgtgaatttatttttttgttattgtaaaaatatttgttaagtatacacaaataaataattcttttatgatgttatcttgcaagaacatgcattttaaatgaaattgacctgtgacttatttttttttatgattttttttattatactataagttttagggtacatgtgcacattgtgccggttagttacatatgtatacatgtgccatgctggtgcactgcacccactaactcgtcatctagcattaggtatatctcccaatgctatccctcccccctccccccaccccaccacagtccccagagtgtgatattccccttcctgtgtccatgtgatctcattgttcaattcccacctatgagtgagaatatgcggtgtttggttttttgttcttgcgatagtttactgagaatgatgatttccaatttcatccatgtccctacaaaggacatgaactcatcattttttatggctgcatagtattccatggtgtatatgtgccacattttcttaatccagtctatcattgttggacatttgggttggttccaagtctttgctattgtgaataatgccgcaataaacatacgtgtgcatgtgtctttatagcagcatgatttatagtcctttgggtatatacccagtagtgggatggctgggtcaaacggtatttctagttctagatccctgaggaatcgccacactgacttccacaatggttgaactagtttacagtcccaccaacagtgtaaaagtgttcctatttctccacatcctctccagcacctgttgtttcctgactttttaatgattgccattctaactggtgtgagatggtatctcattgtggttttgatttgcatttctctgatggccagtgatggtgagcattttttcatgtgttttttggctgcataaatgtcttcttttgagaagtgtctgttcatgtccttcgcccactttttgatggggttgtttgtttttttcttgtaaatttgtttgagttcattgtagattctggatattagccctttgtcagatgagtaggttgcaaaaattttctcccattttgtaggttgcctgtttactctgatggtagtttcttttgctgtgcagaagctctttagttaaattagatcccatttgtcaattttgtcttttgttgccattgcttttggtgttttagacatgaagtccttgcccatgcctatgtcctgaatggtaatgcctagattttcttctagggtttttatggttttaggtctaatgtttaagtctttaatccatcttgaattgatttttgtataaggtgtaaggaaaggatccagtttcagctttctacatatggctagccagttttcccagcaccatttattaaatagggactcttttccccattgcttgtttttctcaggtttgtcaaagatcagatagttgtagatatgcggcgttatttctgagggctctgttctgttccattgatctatatctctgttttggtaccagtaccatgctgttttgattactgtagccttgtagtatagtttgaagtcaggtagtgtgatgcctccagctttgttcttttggcttaggatggacttggcgatgcgggctcttttttggttccatatgaactttaaagtagttttttccaattctgtgaagaaagtcattggtagcttgatggggatggcattgaatctgtaaattaccttgggcagtatggccattttcacgatattgagtcttcctacccatgagcatggaatgttcttccatttgtttgtatcctcttttatttccttgagcagtggtttgtagttctccttgaagaggtccttcacatcccttgtaagttggattcctaggtattttattctctttgaagcaattgtgaatgggagttcactcatgatttggctctctgtttgtctgttgttggtgtataagaatgcttgtgattttggtacattgattttgtatcctgagactttgctgaagttgcttatcagcttaaggagattttgggctgagacaatggggtttctctcaccactcctattcaacatagcgttggaagttctggccggggcaattaggcaggagaaggaaataaacggtattcaattaggaaaagaggaagtcaaattgtccctgtttgcagatgacatgattgtatatctagaaaaccccattgacctgtgacttctaatgtgatcacatgattgtcaggctgaaagttttatcagttggttttcacttttaaggagtttctgtatttcacattatatttcttcagttacttaaaatgaaaaatgctggtattctcatcagaggctgaattttgagtgactattgggtagaaactttaactgaaagcatgaactttttattttataaaatgtacgtaccgccccctagaagacacaagtttgatttatagttaaggttatttcagatcaggataacctggtgtgaacatagcacccattgccttatagggagggtgggtcctctggaggaaaaatcgtctttccaaatggaaagatgaatgaatgaataaatgatcctcttaattgtaaatgagaggcagcatggtttaacacacagaatctaagactgtgctaatacaggcttgcatcacaatttcaactctgatacttactactaatgtgtgaccttgagagtctgaccttcagactccttaaactctgtaaaaatgttctagaaaagcatttctagagtctatgcataattaatctccctaaatatgtcacaaaagacagaaaacaaaagaaaataaattggctggttttattatgtattaaagagttaaacattttcttgctaaaacaatcattaataaaattaaaatatgcaaatactgtgtcacaaggtagcttcatcctataaagtacctttttacaactctaagaaaaagttctatcccttcataggaaagggcatgaagtatttcctttaacaaatatttttgcaatgtttagagaaggggtgagggatttttagccttctctcctgacattattacctacgaggataagagacagagaacatttctcttcctgtttctctacctctggctatacccctgtcaccagctctgccataagtattgaggagacaataatttgatttatgagaccatgctttatgaatggggaagatgactattagttataggtcaggaccctcagaagccctttcccccctgcattctggctcctggtaataagcagagtcatggcaggtacagggatcttccatccttctctagttcccaggtcttttcatccttcagtgaacccacataatgataatgccaggggtgcctcttgggagctgattgactaaggtgacttttagcaaaaatgaagaaagaatacagtacaagctatattcatcaacccagattctccaagggaatcttgcattttgtgtgtctggaagagaaaggtggtaattgtatgtgtgtctggatactaataaagaagaatctttccagaacctctcacttctgtcagggtcaagctccagcaagtgggtgttatccctcagataccactctcttgtcctaactcaggtaagaagaacccatctcctatgggtgaagtgaagccatgaatccatgaaaatcacagactggaacaaagtcctctaagggatgttcttttgactttctaaccctattcccatatctccagtaacatccctctaaatttggagacatatatggggttctcagaattttcttgcacttatttcctgaaatatgctgccaggtttttgagtaggaatggtttgaaaacctccaaagctctcctttaattttgccaaaatgtgatgtatttggtagaaaataaccggagcttattatgtacattctgggctacatcattgtctaggtttttataaatgtgccatgtatacaagagtatatatagagtcaccatatatacaaagagctttttaaatttaagtttgttgagaacaaacacatcagttgtctaaaaaaaaatcttctattgtgctgctgttgttgttgttgttgttgagacagtgtcttgctctgtcgcccaggctggagtgcagtggcatggtgtcaattcactgcaagctttgcctcctgggttcaagtgatactccttcctcaccctcctgagcatctgggattacacgcacccaccaacagcccaactaatctttgtatttttttagtagagacagggtttcaccatgttggccaggctggtctcaaactcctgatctcaagtgatccacccgccgtggcctcccaaagtgctgggattacaggcttgagccactgcacccagcctctactgtgcttttcctacttgaattttaaacatatcccaaaagttatgtggggaagtgaataagttatctacatagtccttgattaggtttgatcagcattagcaacatttcccaacgctgtcatggagacccaaatcacattgatatcaagctacacaccctgaagtgggaaggtggccagaaatggagactttatctaatgtcagtttgcatagactttattaatcaccattaataagaaatgtcaagggacagctgttggagaatagagaatccttcatgtaaggaaacgaatacactgaagacaatcagcattctgggcctttgccaccaaaggttcaccaggaaccttagggatttgagatcattaaaggctgtatctaggtcatgctcctctcttcccaccaggctggcataatccgcaggaacctgaacgtgcatctctagcctatgcacttaggacagtgattcctgctgtcctggcaagttgctgcagctctgaccatggagaagagggtgagaggcaatgcagaccccagccaaatggaggacttgcatttttatagtcactgcccttcatatactgaaaatgaaaatgtataatttctcatgatgaatccctagggtaaaaccaagaagtatttaattatatcaactaccagcaatgattctttcttcatgagaatttagaagtcagagattccaaagggtcttccctaacaataagattgatgccttctgccccctcctcaggcttagttttggcttccataggaccttgcattcctcgccctgtaaaaactggaagaaactctacagggccacttgatccattctctgaggctgaggacctcatcaggctccattcaataggctttttgatgacccagatttcaaatgccccatgacaggaaattctcactgttatatttgtgctttcctgttggacctagtggattttgttttcatattattatttaatttacagacaggaaaatcattggagcctggagttgtcttgataacactgttaatgcaattgccaggacttccctgtgtatgctgcccaaaccctggaacactgaattgctgtgatcgttgtaaggttccaggtgttcatttcaagggtgatcacatgacattccataatcacacttatgaaaggactaattaaaaatacagatgtcttcagctcaaaatacccagacagctgaaatacttattagttttttttatgttaaactccatatcctcacttctttccaacagaaaaactaataatagataacaaagcacagacagggagggccttcagccttttttctcccattaattgacaggctttgtttataaataaaacacctagtacttttacaaattggtattttaccataatacctttttagattactttgttttccctttcagaatggctcagccacaatattgtttgtctagggctagaggatttttataagtttgtagtccaactcttctaatatagaggtgatagtcatacaaaagatcttacgtgtccaagaacatagaaccattaacggtctttcagccttaaaaagaaggtgccttgtaatgcaaatgtcaagttgtctttattctacctgggaggtagaataaacaaaacaattattatattcaaaaacgttttagagatgtgtggacctaagaactttggcatgatgaatgaaaagctctttacagacacattgggtttgcttatgtgaaccagagcaaatgcatttcccctgactggcagataaataattaagatccaaatgtatagttaaaaataatgttaaaaacacaaaatttatgttttatcaagataatatatatttaaggtgcaaagtcaccctgcaaatgctggcatgacgttttattaatttctctcttcattcattcattccttcacatatacacaatcacaatatttgtagggcttgctaggtaagaggcactgtgtgagacactgggtataagtgtacagatatgaacaaaagttgtactggagtaagtcacacattttcaagagtcataatctgtgttcagtttggaaaatgtaccagagacagtaaatctagagatcagaaggtcaacaaaactagagtttggaaggttgagaacataacccaggctttgtatcaccctttatttcaaccctagagaagataataacacatctttgggaaagaaagctgtcaatcttctaattatctaaatcccttggaatgaaagtgaggaaaaggcaaggctggagagaagtggcatcgacctttcccctcacatggattttcctttctgacttctgcattactgtcttcagctctcatgaaaatagcatgataattattgtctgctctcccctatttcattttatttattccagaaatttttttgaggatccactaaggcaggggtccccataccttaggccatggactggtacttgtccatggcctgttaagaaccaggccacacagcaggaggtgagcaacaggcaaacaagcattacagtaatgctcagtaattactgcctactgtcagataagtggcaacattagattctctcacaggagtgtgagccctattgtgaactgtacatgcaagtgatctgggtgacacactcctcatgagagcctaatagtgatgatctgacgtagaagagtttcatcctgaaaccattcccccacccacacccctggtctatggaaaaattatcttccatgaaacaggtccctggtgccaaaacggctggggactgctgcactaaagtatacaggtattttcctaaccattagggatttatcatggatggggcagctgtggcacccagcctcatactgcttgtaaaccctgaaaaaccaaagggttctactctagggttctaatgccaatggcaacaattggctttggaagaagagaaaaaaccttctaattcctcttttaatgtattcattgacccatttgtttttcagggctatgttgtttagtttctatgtatttaaaaggtttctgaggttcctcctgttactgatttatagttttacactattgtggtcagaaaaaaaatgcttgatattattttgatcatcttaaatttgttaagatttgttttgtggcccaacatatgatctatcctggagaatgttccatgtgtggttgagaaaaatgtgtattctgcaactgttggatgaaatgttttgtaaatgtctgttaggttcatttggtctacagtgcagtttaaatctgatgtttctatgttgactttctgtttagatgatctgtccattgctgaaagtggggtgttgaagtttcctgctactgttgtattgcagtctatccctttccttagacttttaaatatttgcttcatatatttggaagctgcaatgttgggtgtatgtatatttacaattgttatgccctcttgctgaattgacccctttattattatatagtaacctcctttgtctctttttacaatttttgacttaaagtctgttttatctaatgtaggtatagctactccttctgtcttctggtttccatttgcatggaatacctttttctatcccttcacttttacttcatgtgtgtacttacacgttgaaatgagtctcttattggcagcatatagttgggttttctttttatccattcagccactctatcccttttaattgaataatttaatctatttacattcaaggtaattattgataggtatttactattgccgtttttctaattgttttctagctgttttgtatatattttcttccttttttccttagtgtcttcctttgtcattaagtgatttcctttagtagcacgttttgattctttgctctttatttttagtgtctctactataggtttttgccatgtggttgttatgaggcttacaaaagcattttatagttgtaacaggttattttaaatgtgtgacaacttaactttattaataaaaaaaagactgtacattttaactctactaccctccctgcctcattgtgaatttttgagtcacaatttacaacattttatattgcatatttcttaatcaattattgtagttattattttttaatagttttgacttttaaccttcatactagggatacaaatagtttacaaaccatgattagaatatgagagtattatagatttgattatatatttacttttacttcaaatgttttgtgttattcattagcattcagtttttcagtttgaagaaatccctttagagtttcttgtaaaacaggaatagtggtgatgaacattcacagcttttgttcttctaaaggatagttttattgggtatagcattcttagtcagcagttattttttcctttagcattttgaatatattttccccctcccttgtggcctttaagatttctgctgagaagtctgctgctaggtatattgaaactcttttatatgtaatttgtgtcatttttcttgctgctttcaggattctttctttgtgtttgacttctgacagtttgataacaatatgtcttgggttatagtcttacttgaattgaatctaattgctgactttaactttcctgtacctagatatgtatatctttcactaagtttggaaatttttctattccttcatctttctattttctcttgaactccattgacctgagcatttgctattttgatgtcaccccttaaatcctataagcttactttggtcttttcaatttatttctcctctaactgtacattttcagatagcttgtcttcaagctcactgattctttccactgcttgataattctgctgttggtgctttctattacatttttcattttattcattctgttttttacatccaggattcctgctttatttaaaaaaaaatctcaatctctatgttaaatttctctgatgaatttctaaatttttctcttattttcttgaagttctctaagcttccttcaaatagcatttttaaattttttgtcagagaggtcatcatcttcatttctttagggtcagtcactaacatcttattttatccattaggcagtgtcatttttctctacttgttcttaatccttatggttatatatcagtgtctatgcattgaatatgcaggtatttatttcagtcttttcagtttgattttttatgtgactgttctgcagtaggcctatctagaaattcggagaaaactgtctcttttggtcttttctaaaccaatgactgctgcacttgttgcagtgctagaagcacttggtttgctgtggctggcaccaaggtttgctgtggctggcaccaaggtttgtgttttggttgctgtgagctccacccctcttctttgtttctaattgacccctaatagactaagcctgctaacactcacaatggttctcataaaatgagaccaaagcaagcctcctataaagggttccagaatggagaggatgccaaaattccacctctaatacaccttttccattgtaaaaaccataaattcagaggaagtttcttcatgtcgtactgtacaggcttgggagagggacatagcggtcaaaaaggacagttacttttactgtctaattatggtttttctctgctctgtgctcaaagtcaatattacagctttgctcctgagttcttaaatattcagggtggtaatcttgcctctggatagatgctagttgggtttccatggaaggagaaatgtcagaaaactcctacttcaccattttactgatattacttcatcaggaccttctaattttgattttacttttcaatctttattttttctaaaactttttgtttcctcatttttcaagtattaaattatcctagttgttctagtagaaagcactgtcttatgtgtgaacagtgacagataaattagatattctcagaatattcaatgatggcaactagaaataatcctggctcaatatcagtttacaaatttgattgttttctctatgttctgaatttttttttttttttttgagatagagtctcactctatcacccaggctggagtgcagtggcgtaatcttggcttgctacaacctctgcctcttgggttcaaacgattctcctgcctcagcctcccgagtagttgggactacaggtgtgcgccaccatgcctggctaatttttgtgtttttagtagaaatggggtttcaccatatcagccaggatggtgtcgatctcctgacctcatgatccactgcctcagcctcccaaagtgctgggattacaggcgtgagccactgcacccagcccattctgaaatttttgtgttctactttctaagtcagtagacattcattattcactatgataactactattacatgtggctattgagcacttgaaatgtggccagtccaaactgaaaggtactgcaagtataaaatgtgtaccagatttcaagaattttatattaaaaagaatgcaaaggccagtcgcagtggctcacgcctgtaatcccagcactttgggaggccgaggagggtggatcatgaggtcaggagttcgagaccagcctggccaatatggtgaaccccgtctctactaaaaatacaaaaagtagcctggcgtggtggtgtacacctgtaatcccagctactcaggaggctgaggcaggagaatcgcttgaatctaagaggcagaggttgccgtgagccaagatcgcaccactgcactccagcctgggtgatagagcgagattgcatctcaaaaaaaaaaaagcaaaatattatgttaatacctttatattgattatatgttaaaataataatatgttggatatattgtgttatgtaaaatacattattaaaattaatttcacctgtttctttttccttttcaaaatgtagttaccaggacatcttaaattgcaaagaggctctcattacatttccataggccagcactgcacttctcccttgccactcttcattaacacatgaggtatcattctcaactatatttgctaataatttactctcctcccttctcctggcaatatttaaaatattactgagtgttttccaggtcctgtctattgtgattgtgctggacatgtaataatgaagaaagccaaataagtcccctgctttcacatgacttctgttttataggcaaccccaatgacattagggtggtcacccctgcccacgcacttagtttcagtcattactggactaaagcaattgagaagaagtacaacccattctaatatgagttgcactattaatagttcacagttgatcatatgtcttgttacttgttatctaagtgtctacagcatctccagtacaatgcttctcagagtttgtagaatatgtgtggctttggaaattcagaggtgttctgaaaacaaagaaacagaaagcacgtctgtgatcaaagacatttggggaattctgggttaaatgaaacacaacatgcctctttactgcaggactcgtcaaagcttttgcttttccaatgcagtattatgaaactctaaaagcaggatatcatgaaagtttttaaacgcatttgaccaagaattctgattctggtgagatgtttttcctgggaataaaattgtggacaataaaattttggagatggtgttcagttcatttcttcatcatccctcattttgacatatgctgtcctaggctggttctacagcagctacctctcaagtgttcatatccacactggtcttgtttgtgctttgtgtttctgggactagagctctaaaaccatatttctactctactacctggctccacctaggttctgctagttgaggaagactagaagaaggctttctgcttcctgtttctttctgcctcttgttcttttaacgatgtcctaagcaacggctaacagtactcaccctaacagtagtagttctttcctgtctcagcagctgaatccagctgggttttttaaaatgacacttacagaactagtgccataacccccgtcccccaatcagcatgggccagtttagacccctcctcagttgtttgagcctcagctccaaggtgtcccttctgtaagggtctaagtattcataattaaaatctctttcgtttgttcacacagctgtggggtggtagctatttactacaggtgctacttttggataccacagggtgttatctttgtcatttcagttcctcaacacagctctttatattaaattttctgttaaaagaatacatgcagttctttctgactcctgattatacctgtccaatatactccattcattctccccactccctaggccaacaatctgagtggtaaagcagaaagtgatttgaatgagatcatataaaggattccagcattatctcagtcactgtttctgggctaaactgagctgtctctgttctcagctctcagagtgagctcttctcagtcgctaggaagttaaggcctaagaagacgagcctccatggaacagacctaccaccagcctacccctgctggcttttcctggtttgtttagtcatgaatacattgatctgaatttgtcacatttattcttctcacttggaatcttgtatctactaccttgacaaaatcatggaaagagaccatgaccacatttttattatctgattgtcttcctggaaataaagagttgcgactgtcactggctggcaactataattgttaaacctaactgaagaattgaagtctactacattcaggagtgtttggatcctagaccctgattttggctttcaattcatgtctttctgcactggcacatttttgcatatgtatacatgttcatgtgttgtaggtccttctgtgtccatatatgcacacttgcatgtacaggaacaggtgccactgtgtaggcatgtgtgtgatgtgtgcatgtgtgaatatgtgtgtgtgtgaatgtgcttaggatagacaagaccattttcatacacaagactattttcaccactatatctctagtatctcacatagggtctgtgctaatggatactcaaacatagttattgaatgaatgaatggatgcatgaaagaatgagtgttaatgctaacacaaaaaggaatgaaatctgttcatttctttatttaaggtgggcccatctagatcagctctatttaatagacatataatgcaagtcacataagtaattttaaattttctagtaaccacattgaggaaaataaaaagaaatagaataaattaattttaaaaatatttttatataatcaatatgtccaaagcgtcattatttcagaataatgaatataaaataaataccaatgagatatttgcatttttaaaagcctttgaaattcagtatatattttactctcatagcacatctaagttaggagtagccacatttcatggactcaatagtcccatgtggctcaaaattgcagttttagtcagtttaagtcttgttaatatcctttggacaatggaggaatggaggatattttctattttctattcttcaaagtttagaataaggagtctttggaatccaggatactttctggattggagaaacgttggttgagaatgtgaatctctgataacccttaattgctgcaaaagttacatggttcagctcacatgtctttctctgtcctcccactccagtgttctggaggggaaccaaactagggccctattctgaaacctgttttcctttcctaaaatctgagcccctttgctggaaatgtgtctctctctctggaacctgatcccattccggaaacctgtatctttttctggaactggctacaactatctctttcctcttcaagctcagccatgaagaaattttttaaaaataaagaatacaaacacacactaataacaagaaagcatgtgttatcttctctctcgtatcctgcatcttcaatgtctttgtattagatcagatattgctcaaaatacaggagcctgaaatttctacccaccctttttttttgagccagaaattccctagattcacaatgtcatcatccacccctatcaataccccattttatggctgtgacggtggtagaaattcacatggccttagtggaaagccctgtgtctccccttccccctgcctcatcttctctgttattaggtacaacagaatctcagagatggctccattggcttcagaccttctgcccattacattacatacaatgtctttttaaattttctaaaatggagtaatttttaacaagcgggtggtggggagtacttcccatatttttcattaacgtatactgttaactatgccagtaaattatggataatttaatttaatttaggcttaatggcaacatttttcctcactaatgaaatggttatttgttattaggaaaatatttattgaagtggaattgtgtgatctctcacatcattattaaaccttgttaaaccattttttaatttcaatttgggtttaattaagagtcattaagcattttattgaatctaaattaaattctaatggaaatgggatttgccaaagagacagttgtgccctttcttcactctcagttctctcaaagtgacatagttacaaaaggacttggggtgaagtggaactccaatattattgataaaatggaaagaacaaaggctttgtttcagattgatcatagttctaataccagaactgcttctgacataccatgagaccttgggcaagtcatatcatttttgtgataatcaccttactcttctgtaagatgaggactgtaatagagtgtctgtggaaacaaaaggacaaaaattatataccaaatggatattttaagcttctttttttgtctgaggtatctacaattccttaggaaatggaatttaaaaaaaaaaagtttgttgaaggaaaaaaaaaaaaggaaaccgatgtgactaaaaaaatgccaatgtacatcgagttgtctatctgaagcctgaattcccaaagaggatgtaactggagcaaagacaagggagtaaattagagtttaatgagcctgaacttggaaaaggctagaccaagaagacaggagcacaggtcaactgtgatgagtcttgtccacctgaaaacacatgggaggcttcccccctgggtttggaccttatgaaacatttggttaacgtgaagcctgcatgacatggatagatctttcttggcccaatatagtggaattcaaaagtaaatcctagtcctatgtagattccttgaaagggataaatatcaatattcattctttcaacagattacctccatggatctcctatatgccaagtcatattagggatatggcagccaacaagctcagacaaatcctcttgggaactttgtgacataatggtagagaaacacatggcaacaacacaccacaaaataacaagtggtataatgagaatatgaataatgtgctctgttaagaggattgtctgatgtgccaattattgaatattgactctgcatgacttaccagcatgtcatccctctaagagtctcttctctgaattctactttggatattcaccaaagtcttaactcaactcttgaattcaatctcacctgtagctcctggaaaaaaaatgtcattttttcctgaatgacccaccagttggataagtctctaattttacctgctcaggagagctgctggagtatacctcttcaaaaagaaacattcatccttgacatgactttcacttcttctggaattagttctttagaaatatgtacaggtctttatttttgatgtatctcaaccttagatggaatcttttgccatcttgatatctgaagacagttttcaacacatacctaaacccagggaggctttttacctcccagtacttttctttgctttttatatattcaataattaaaaccagaggaaaacttatacaggccaaagagagcaagggggcagcccctgaatggttcctgcattaacactaaatatatttattttcatcagcctaacacatactcatgtgcacatgtgcatatgtatgtgagtacagaggtatgtgcacatgcatgcagactcagttgcataacttccatctacacttccagatcaattctacatccacttttactctgttctgcgatccagaagtctgacaagtgtggccaacctcaatgagtcctctcaacttttggcttctggttggggtcagcagaaaaattcagagagaaagaagagtgaagggaattaatgtgttctgtcatctcccttcctatgaggtatcatgcgtggcttcatgtgttgaccaagattacagcttctgccatatgactgtttttctccaggggactgctctctgtcctcatcccttcaggtctagggcagtcacagagttctggtattgctatccccagaacactacactgtggtgtgcccttatggttactctgcaacctgcttatgcctttgtaaatagttgctttactaaacacttttgaagttgccaagtttgattgtgctatctgctttctaccatgaccctgatttatagatgtacacagaagcactcagatcaaaggtctcattcaatgttgaactagactgccttttcagggggctggtaacattgcctattggccagtcaaggtgtctctaactgtgtttctagtcaatctgagatataataaaagtgctggaaagatcagcagacttgatccattccttcaccatgtctttctgctcccaggagaaggtcaagctctgtaagtttccatctaatggcttcttttgtcttcattccagcaaaggagaggactgagtggcccagatggaaagcagaaatgcagacagaggcctgtggaagaagaatcttaaaataactaagcaactccaagaaaacaagtgaggatttattggaaacaactgccttgaaagaagaaaaaaacactccaacttggtaagaaagatgagaggacataaaaacaagtcagattagaatcaccataagaaaattaaaaagaaagaaagaaaaaaagaaaggggatagtccaaaaaaaaaaaaaaaaaaaaagtccagagagcaaaagtccaggatacctgggcctctgtcttccttttaccagctacggggtgatctaaacttatatatctgagcactcactggcactgaaaaaaaaaatcacagaagtagagtgaggagtaaggaagacgacctagaacatcttttcactggtgtgaattgacagaaaaatcaggccattacttcaaggagtgggatgatgactttatggggatatcacctaagtacagcctgacgccccatgctaccctcactcccaagaccagccaagaaagatggatcaggaagccaggtcaacagttccatctttgatacttactagctataagactgaagaagttgtccgatatctttgtctcagttttttttatatgaaaaatgacagacaattcatgaggttgttgtgaagactaaaagaaagattaaaagtattgcattgttatctcgtataaaattaagacttaaaaaaataatttccctctctccatctctttctttcttttcttcccctttacttccttcatttttccctgccatccttctcctctcaatctgatgttaaagctctatacagatattcgttattttgctattgttgttgttgttgttgatactattattatttttgataccactattattttgttgtgcagttttgttttgttttgttttttgagatggggttttcctctgtcactcaggctggagtgcagtggcacaatctcggctcactgtagcctccgcctccagggttccagggcttctctttcctcagtctcctgggtagctgggattacaggcacacgctagcacatgccaccatacctggctaatttttgtatttttagtagagatggggtttcacaatgttggccaggctgttctcgatctcctgacctcaggtggcctgcctacctcggcctcccaaagtgctgggattacagacgggagtcactgcacctggcctgttgtgcagttttatttaccctgggttttttttttgtttttttttttaacagatattagcctctcttcagccttttccaccccatctggaatcttacaacgaactgttgggttttaacacagtgttttgtcctatttttaaaccaaattcattagaaaccaagaaaaagaagagaaaaaatcaacagtagtatttcccaaagttaaggcttaattttattttgtgtttgttagttatgggtgttcttgctagtcaatttttccaagttagagctcaggtggaattttattgccaatctgcctattgataacaaagaccatctttttgagcactcaatattgaggtggcatttccccttctagcttacagaatcaggcaatggatgaagcagttctggaaaggcttccttccgccaacttggacacattttttctttttccagcccagatgaacttcctcatttctccgctctgatgataagccctgtttaggctcgtgctttcatctgcctgggtggcatcagaattcgggggacatgtgacctcagctcttgtgtttggatggcatgtggctatgagactctgctaaagtaaacaagttttatataatagacaatgatgacaataaagatagtaatataaaaacaagttgtacagggcatctactctgctgtgctagagactctggagagatgatgtctatttctcagaaccatggtggttagggaccgttatcccatttcttaaagaaagaggcccagggggctgcaaatctttacccaaagtcatgcacccacagctagtgagaggcaaagccaagattttctttacattttgtgatctttttctctctcagtgaaaatatttgcggcggtatttttctccttaccacatattaagcaccattaaaattaagcacattaagcaagtttgcacaagaagagagagaagaggaaaatgcaaaggtaaccaggggagtagaatgttctctggccttgctgggactgtccactccagtagaaacgaaagggagtcctacaggagatgatgcagctcaggtgccttctaaggtacattcctgccacccaccttgcaaggcagaggcttaaactctcgtctttttgctccattcatatccacaatgcctcttaagatcctctggagcctttcttacagacaatattttgtcctttccagaccttgcttggtgaaaatcacgttagaagtggtaagtagaaagatgaagacttccagctccttctgttactcttcccaccacttctgttctgaaaagctagacttgctcaggttttagctgtcatcactgctcatctcatttcaaattttaatggtagtgacaagtactttcttttcttccccctctacttgtgctttcctgtttctcagtatccattcaaatccctgccaagactagaaagattcacagcctttatctcactgtctagcagagtttgaacatatctcactgcagatatggggtgaaaggtatgttattattgagactgtgatgcaatgcatcccccaaaattgtttgtcattcatttaacaaatattcactgagtcataaagtgattaaaaattcaggctctagaatcagattggctgaatatgcagtacagccctgacattgtttaaactatgtaaatcttgagtaagttactaaagcttcctaagccttatttacctcttctgtaaaatggggataataacgggtaggtgttactaggattaaatgcgtgtcaagcacttggcatgtttgcccagcatagattttgtgaagtcagagataccttgatctcggcaagaactgtgtctatatgtatctgaaggaagaggggagaaactggagtttctatgtggctccagctctgcatggctcctcctacctactgatgtggccttgaccaggccctattctctctgagcctcagtcttctcttgtcatgggataagactttcataactacacgaaatattcaaaactaatcttaaatcagtgtaactgttcaataaaatgatatcttgcactctatattcctgttttattaacctatcagtgaggcagatctaggggcctttatctgggttttaaagaagctactaggaattttcttggctacagtcagggacattgttcaaagactgtgtatgtgcaggggcagtgggtgcagagtcattaggcactcattggcttttctgagaaaaatgagctcaggaaaaccaaaatcttggccacttttccattctaacacctcatctttctctaaggttaagctaacctggtgagcagttcctagcctggaataggcccctctgccacagtcagctttagggaaatgagaaaaacagtcaaaataatgcagcccacgtgacactcatgccagcttcacccagggaaggagtggaacttaagctctccagcccctccaggtatcagcccgaaagttaacattaaatacaggactgtgagtctgaatgagtccactgtggaaggttctctaaaggtcgaagagatctatttgattcatttaaataaattaaaaaactttttggaataactttagatttgtataaaggtctcaaagctagtccagaattcctggtatatttcttctagcttttcctgatgtgaacatattatatattatggtatatttgccagaactataaaatcaacactggtaaattactaactaacctccagactttatttgggtttcaccaatttttccatgattgttcttttttgttcaaggatttaatctagtatacttcactgaacatagtctatgcatgacttttaatgtgctgattggttttgtgctgctatagagacatatttctgggtgatctacaaagaaaagaggtttatttggttcacaggtctgcagactgtaagaagcccaacacctccatctgcttcctgtgagggccttaggaaggttccaatcatggcagaagggaatggggagccaacatgtcacaatgtgagagagagagagagcaagaaagagaaagaagaggaaggtgtcatgctctttttagcaatcagatctttcaggaactaatggaataaaaactcactcattaccatgagaacttcgtcaagccattcatgaagaatccacccctatgacccaaacacctcctgctcggccccacttctaacataggacatcaagtttcctcatgagatttggagggggcaaatatctgaactacatcaaatatgtcagtatttgctttccgatgtagacagttctgtgtgtactaaaagagtctacaatttgagctctgatttaagcatctttccttctagagaaatccattccttgtatgtttatcttagtcatatcccaaggaagtggtcaggatgctcagattttacttaatacccttatgagaaattattttgactttttactcctccactaggtggttaaacagtgaatttccttgtttgaagaatgcattgattatgtgccaggcagtgtgctagatgcttatacagattacctaatttaattatcctaatgttcctttgtgggaagtagtagtattattactgttatccagacaaaaagactgggttccagagagatttatcacttgcccaaataaagtggaagaaccagaatttaaagcagtcttgtaactttgaagacaatttgctcctctgatgtttccattttaaggcctctgttttgcagagctctagctctagagcaagaaaaaacctacggtttctcttacaggctgcaaagagatggtgttcacctctgtgtgcttcaagatatggtttacatagctaatgtacagtgctcttagtcagcattagttcaagattaaatgtttcagagcctaaagagtaagatgtcagtgattcctgatggatctaaaatagcaagtaaatcgtgcagtggttcaaatgctggataaaagagcttatctgcagctgggcacggtggctcacgcctgcaatcctaacactttgagaaactgaaatgggtgaattgtttgagcccaggagtttgagaccagcctgggcaacatggcaaaaccccatctctacaaaaaaaaaaaaaatacaaaaaaattatctgggcttggtggctcatgactgtagtcccagctacttgggaggctgagatggcaggatcgcctgagctcagggatgtcgaggctgcagtgagctgagatcatgccactgaacttcagcatgggtgacacagcgagatcctctctcaaaaggaaaaaaaaaaaagcttatctgcattatctcccagctctcctcacaacgtatatacttaacagaagcttggcattttactcctgaatgcccaggatactatgcatacatttccctccctgctggtaggtgtttctctgggaagaggaaaaccacagcactttgccgaggaagattagaatcagcgtggggaaaattctgaattgggcgcagagggctccgactgagtgtgggatagggggattcaaggacaaggacggaccaggaaggtcatgcattcaggcctgagacccgtttcatcaaccttgggtacagggtgtgtgcgcatataactacacataaatccagattaaggagagacagacaaattttccaacacttgtaggcacaaatcagttcatttatttattcatctatagaacaagcatttattgagtacttttgatgagctaggctctgtgtccacagatttctcatcttagtctgcttctcaaagctttattaggccttccatgggtgcagctatatgccagcctcaggaaacctatctttctgaaaaatacatttttttttctttcaaaggaaaggagaagctagtttctgagggacacaagaaaatcaaagaaaccagagcaaagtgcaggatgccatattcctaatagcaggaagaaaacagggtcctgttgtaccttagtgaccccgaattcctcagggtggagcaaatgcagaagggctccagggccatctgcatctgtgattttcattattgcatcctctctgtctcttccgtcctgtatataccagtaattaaactgacaatgagaaatgcacatctaggtgtcaggatagagtgagtggggccatggtggacattgtgggaagggacagaatggatgtgctctgccatgagtggaccaccatcactaaaatggacagttgttgtaccaaaaaagaaccatagacagagaccatagacagaaaggacacatactcctttgggaaatatgtactgcagcaaagaagggtcacttattgctataaattttcctctacgtactgctttagtagtatctcacaaatgcaaattttaatgtattgttttccttttcatttagttcaaagtactttattttgatttcacctttgacccagaacttatctagaggtatgttatttgtgttcagatatttctgtttttcattttaatttgattttaccatggtcaaagaacatattttttacaactttaaaattttagcccgggcaccgtggctcacgcctgtaatcccaacactttgggaggctgaagtgggtggatcatgaggtcaggtgttcaagaccagccagatcaacatgatgaaaccctgtctgtactaaaaatataaaaattagccgggcgtggtggcgtgtacctgtaatcctagctactcaggattgtgtgaggcaggaggctgaggcaggagaattgcttgaacctgggaggcggaggttgcagtgagctgagatcgtgccattgtactccagcctgggcaacagagggagacttcatctcaaaaaaaaaaaaattgaaaatgtgttaatttaataatttgaagacttgtttcatgggccagaatatggtttatcttggtaaatattctgtgttcacttgaaaagcatttgtattgtattgttaggtggaatgttctctaaacatcaatttagtcaagtagtttattgtgtattattcacttttctttgcatttactgattttctgtcaacctctttatcagttattgagaaagaggtattgaaatctctaggtttccacctgtaattgctgatttgtctatttcttcttgttatttagtcagttcttttttattttttttctttttttccagagataaagtctcactctatcacccaggctggagtgcagtgatgcaacctggcctcactgcaacatcagcctccctggttcaagtgattctcttgcctcagcctctggagtagctgggattacagacttaatccaccatgcccagctaattttgtaattttagtagagacagggtttcaccatgttggccaggctggtttcgaactcctgacctcaagtgatccacccacctcagcctcccaaagttctgggattacaggtgtgagccactgcatccagcctatttagtcagtttctgatttttgtgtttgaagctttgtttttgggcatgtgatatgatttggctgtgtccccacccaaatctcaacttcaattgtatctcccagaattcccacctgttgtgggagggacccaggaggaggtaattgaatcatgggggctggtctttcccatggtattctcatgatagtgaataattctcacgagatctaatgggtttatcaggagtttctgcttttgcttcttcctcattttctcttgctattaccatgtaagaagtgcctttcacctcctacatgattctgaggcctccacagccatgtggaaccataagtccaattaaacctctttttcttcccagtctcaggtacgtctttgccagctgcgtaaaaacagactaatatagcatgtaaatgtttgggattgttatgtctcttatgaatttacatctttatcattataaaacaatttttttctatccttggtaaaatttcttgctctgaaatttagtctgatattaatataatcattacagaattttttaaaaatggactttattgttttagaacactttttatacttacagaaaatttgagaagataatacagaaagctcatatacttcaagctatgggatgaattgtgttcaacaaagaaggtatgttgaagttttaacctcctcaaaatatgacttcatttgaaaacagtgtaattgtaaacaactattctaagtttattttcaaatgacactaaaccacttcaaggataatgcaggtatcttaaacagagtattgtcagttcttccctccagttccttataaaatggttgtcattcatttcatttgtctatatgctataattattcaatacatattactatttttcttcttaacaaattgttaactactggatcaattaagaatataaaaaatgaaagatttaattttgtcttcattccttcttcctggatgcttttcttttctaaggtaaatccaaaattctgacctatcatttttcttctctttcaagaactgcttttaatatttcttgcacagaaggtctgtgactaaatttcctgtttttgtatgtttaagaaagtctttatttcttcttcattttttattttaaatcaggtaaaatttatataacataaaattaaccattttaaaatgaactgttcaatggcatttagtacactcacaatgttgtacaactatcacctctattcagttcaaaaatttcaccctaaaagaaaatgctgtgcttattcagctgttgcatctcatttctctatctttctaagccctaaaaactaccaattggggtctgtctctatggatttactacatcacatattttatataaatggaattatacaatatataatcttttttgcctgtgcttcctttggtagacataatattgttaaggcacacccatattgtagcatgtatcagtgcttcatttcttttcctggttaaataatattttattgtatgtacatattataatttgcccatttattcatttatgggcgtttgggttactcccaccttttgactattgcaaatagtgctgatcttaatatgtgtgtacagtgtacatgtgtttgtttgagtatgtttttaatttttttgatatatacctatgagtggaacttttgaataatgtggaaaacctatgtttaacttgttgaagaacttcaccctaacatttgaaaataaatttcacttgatatagaattcttggttgttctcttactttttatttggcacttttaatatttcattgtattttcttcttgcttgcatagtttctgataagaaatctgctgtaattttcatccttattccttgaggtaacatgtttcttttcctctggaagtgctcaagattttctccttgtgtttggttttctgcagtttgaatttgatatatttgagtgtagatttttggcattgttcttgcttggtactctgtgctttctatatctgaggttttgtacctgtcaataatttggggaatttcttagccattattcaaatagttattctgtttcattatcccttttattctggcacaccaataacacatatgtcacaccttttggaatgccccactgttcttggctattttgtacttttatttatttttcattcttttttcgtttcattttgagaagtttctattgacatgaatttaagctcttctgattttttttacttgattttgtctaatctactgatgagtctattcttcacttctgttatagtgcttttgtttcctgtttgatctttcttagaatttccaactctgtacttgctcacattacccatctgttcttacatgttgtctactttttcccttaaagcatttaacatattaattatttaaaattatctgcctgataattacaaaatctatgttatatttgattctgattctgatgcttgtctcttcaattttttttttgccttttagcatgccatgtatacttttgttgaaaattaaacatgacttattgagtaataggaactaaggtaaaagggcttttgtgtacattgctatggaaactgagctaggcattggctctgtttaatgttttctttatctatgcgtattaaagatttcaatttcctctggtgtccttgatttttttttccttttttgtgtttgagttttcctaaaaactcctttttaatagtctgtgccttgcagttcttttaactgtaattcactgttattatatgaaagctttgatgacagggtggtaaggtatacactttctataatgctatgattaagcctcagtcttttagtgggcttctgtctctgatctgtgaccatcctaagtgtatctcagtgttttttcccatattaggtaagacatgaagggtagagggtggagaatggagacatttcccttactgcacagtggatatggctttagtaaagtcttttctcttgccaagtagacttgtcttatggagaatgctctgggcatatttcaaagtggttactttatccttccttctgccataaatgtaaggcttttctcttgcctctttactgtgagaaatgggtaggttttctgttgttttcaggaggtaaaaacccaaggaacagtagaggcttccctaagagtgtggtttctaggaattcttcactctccagctacttcacactaagactccagcaatttattaaaattatgatttaagcattactatcagctaatggctccagctacttctgctccaagtaagctagtcatggctgcagaaccatgcagtttcttatctttctagatttcttggtggtactttgccctgtgacctcaattctctgatggactcagaaaaagtcatgatttttggtttgttcaggttttttttttcttattgtacgaatagaagtgataaccttcaagacctttacatgtcagagctaaaagccagtatttatttcactggtgttagtataatatatcctttcccatcatttaacttttagtctatttgcatctttatattccaatatttttataggtaacatttagttaggttttgttattttatccaatctgacaatctcagccttttaatttgagagtttaggtcatttacatttaatatatttattaatatggttcagtttaaatctattctctttctctttggtttctgtctgactaatttcttctcctgtttttttcttctaccctctgtttaattaattgagtactttctgcgattccattttatattctttagctcttgtctattattacattttactggttgctttaaagtttatagtttacaatatatattcttaacttactacagtttaccttcaagtgatattatatactttgtatgcattataagaaccttaaaatagtatacttctatttctatttcatttctctgggcttttttatttttattttattttattctattttattttacttttgagacagagtttcactctgtctccagggctgaagtacagtggcatgatctcagctcactgcaacctctgcctcccaggttcaagcaattctcctgcctcagcctcccaagtagctgagattacaggtacccaccactacacccagctatttttttgtatttttagtagagacggggtttcaccatgttggtaaggctggtcttgaactcctgaccttgtgattcacccgcctcggcctaccaaagtgctgggaatacaggagtgggccactgattcttttctgggcttttttgttactgtggtaataccttttagttttatatatgttataaagtatgcatcacatatttattattttgtttaaacagccaattgcatcttgaaggatttaaacaataagaacaaaatcttacatatttgtccacagacttaatatttcttgtgctatttatttgtttaaaacatgtgtattaggcagaagaatagtcttttacctccatgatgtcaatgtcataatttgcagaccctttgaatattttaacatatataatgaaagagattttgcagatgtgatcaaagttaaggaccttgtaataggagcttatcctggattattcagaaggccctcacttaatcacttaattctctaaaaggaaagaacctttcctggctgaagtcagaggctgaggtcagaggaagacgtgactatagaagaatgatcataggattgcaatattgctggtcttgaagacagaggaaggatgtgggttacatctagaaactggaaaaggtaaggaaacagattccccttcagtaccttcaaaaagaaacacaactttgccaatatcttgatttttagcctagtgctctctgtgtcagtcttatgatctatagaactatacgataataaatttgtttttttaagccaccaagtttgtggtaacttgttagagtagcaatagaaaactaatacatgatgtatcatcagtgagaataccatcacccccaagaggatgaaattggttcttggatgccaacatacttttttatgtataaatattactttttgtgtgtaaatcatgaatatgcatgcagtacataaatagatatacagtgtatctgtggcattaaaactttatgacttagtacttagggaaaaaagtctaaaaagactccttaggggatgataataagaaacacttgagaaacactggttcagatgcatattttcatcgtcttattttccttcagcctgaagtatttcctttattgtgtcttgtggtgtaactttaccatctgtaggtggtaaattatttcagtgtttctatgtctgaaaaaaactttagtttgctttcatatttgaaaaatactcttgctgggtatagaattctacattgacagttttttaccccttttattactttaaaagattgttgcactgtcttttgtttttctggtttctgacataaagttcactgttatccctaaacttgctcttctgtgtttaacatgtcctttttctttgtctattttgaaagtttgtactcatcacttgttttgagaaatttggttatgctctgctttgggttagttttctatgtttggtgtttatagggcttttcaaatctacatatttatagttttaatctaacttggaaacatttgggcaactgtttcctcaatttttgttttcttctcctcttttgggtattccaatttagtgtatattagatctcttaaaatcgtcctatagatcactaatgcttttctccatttcttttttacttttttaaagtatttgattttgcatcatttctattaccatgtcttcaagtttactaatgtttcttccagttatatctaagctacatacatcatagatctttctctcaaacattttacattttaccaataatattttggtttatatttatatttgtcctgtctctacttaatttttaaacatatgagaaaaattatacatccaatgtccttgcttactaattttaatatctgtgctgatactgggaagttttaatttattgatttttttcttattattttagtttttgtttgcatacttggtaattcttgattgtgtaccagatattgtgaagtttgcatttttggatgtttgatgcttgcatgtgtgtgtgtgtgcatgttcttaacctttgttctgaataaggttacttgaaaactggttctctagaattttgtgttttaagatttgttaggggagaccagaacattgtttattctacgactaatctttctctagtactgaggcaagaacctatgctgagaaaaatatgagcatttctttgaattcattaagagagggtgttattattgatcagccgtgtcaatcatggagagcagatggaagaggtagcacatgtacccattatctgcattctatattatgtatattcgtgtaataaagaaccaagaatgattaccttggaattttcccaagatactgagatactccaagtaggggggcatcagggaagatgactgagattattactcacattttaaaataagtaaggtcgaagaggctaaatgactttttaaattcaatgagacttcaatgcaagaaccaggatttgaattccatttaaccccatttttaaatagccaatttaattggagagatggaagcaaaatgacagacaatgaaagtgatattggggcttcacaagactatttcactgtcccttaactacattatgtaagttgctgtgtcatctacccattctaggtgaggaccacacgtggaaaagggaggctgagaatgtaagacatcagcagagtgtggatctgatagctgtgttgggactaatggaagatagatggtttgagaggtaaggagatggctgggcactgctgggaatgttttgaaggcacatctgggctaaacagggagtatcatgaatgattagcagtatttgctttgagcttggtgaaatgaaggtaaaggagtgtaaataaaggccattatgttaacaacctaggcttcttttcacaagatcatgacaaagaccttggtggataaaatcttgctggttgtattacttttttgtttatttgcagttagttagtttgaaatttcctaggtgaaaccatttccccttattgcaaatatttttcatgggactattgatgtcattcttccactcccttgcagcaggatggacagataaccacagaacccaccaaaattcttctctggaaatgatgcatatatatatgcaggcacataaaaatatttatatagagatatatatcttttctatatataatacacatattttatagataaaaatattttatctatagaaatatacacttttctctctatatatttattaatatttaaattatatttatatgttagaatatatagagaaatatatatagaatatatatagagaaaatacatattttctattttctctatatattatttacatattatatatagaaaatatatatattatctatatatttctacatgtattctatatatttctgtatattatatataattatatattatatagaaatatatatcatatattaaaatacataatgtatattcaaatactttgtttttatatataaaatacttttatataacagtatttctataaaaataaatattttatatatttctatatatctatatttctatgtctagcatagaaatatatatattattaaaaatatgtaatatatatttttatagaaatactttgttttggtttgctgagctataaaaatatgtcgggggctaacagtgagcatctcttctagtttcatggtgaagatgatgatggtaaagggtctggactgagccacacttgaaagataacaaatatacttgagaatctcaattgagccattcctgaaactaacatgaacttccttgttatataggccaaacaattccattatgttcttaaaccagtatctcagtttggtttccccagaagcagaccttgagacaaggatttaagtgcaagttctttatcttagagataatactaggatataatagtatgaaagaagagaagcaaaacaaggaacagaagacagtcactaaaagtcttcttatccaggcagtaaccacaatacataattggagcgtaatctctttgggaaaccttaggagccagtataaaaatgtgtctgcagattatcccacctgtggagagaggggttgggggtatctatgtactatgccctttagtcagttattgagttgtgatcccaggagacatcaattcctggaagttctggctgccttgtgggtgggtggcagcatgggctcgtagaaccagaggaagccctcaggcaacgaaatgcagggctggccaatttaagttgggctagtgtggactgaggtgagggtgaagagacatgagtgtcgcaaaggcgaggtctgtcgcagcttcactgagttgaatttccatcacctgcaacagagagtgctgggagaattcagggcccctcatgtgctctcagacctgatccatgccaccatccagctttgtagagaaggcagcactgtttccctttcttgaaggatcaccctgccctctaggtggcatatgtgtgtaccccaagatctagacactgagaatggaactcggtagcctctctgcggagaaagacaaacccttatgaagatcagatgaggctttcattgcaggaggccttatactatttacccactgacaacttctttctcatgaaagtttgttttcagggttgtgccctgcctaatgtgatttgtttatttttcttgagtgagaaccagctttggcttttaggatttggcctcagttgtatttcccattagtcattttccctgcaataaatgttgttggctgtaaagttggagtccttttagcacaactgggaggggcttgaggctcccaaatattggcctttttctagaggaagcaaaaagaatagcatgaggtaaagaagagtgtctgaagtcagtaactattgttttgatatgcttagattttacccccacatcttattctttacccacccaaatctttgacactagaacatgagaaggaaaataaggcaggcaggcaggaagtgatggtggtacaaaattaggctggagtgatgggcaggaaccatctcccttagttctaagatcaacccaaggaaggtcatgtcctcaaggaaggatggatcattcccacattcaaactgtaaacaccatcatctcactttttataaaggctttcttatgagctcctgaagttgagcgttaactggtaaatgtgatcgtgtaccacattccccctcctctcttgccccagaccctgccaacactacaatcttcatcagatcacacccaatcagagaacacttagtgtagatactaagagttgggggtgcattgttcaaaatctctgatctttggtaaagttcactcattaagtctgtttttttaagcatctgatccattccagggaccgttttagacacctgcaataaagtgatgaaaaagaaagacagtctcagtcctcaagaaacttctgttctgattagataggcagaagacaaataagaaagacattaattcaatagttatgcaacatctctgtgccttagtttccaccaacatatgtgaaatggagtcaataaaaacacccactttgtgttgtaagagttagatgacctaagatggaatcgatggaagagaccctcgcttattcatcattgctccctgtgtatccattctctggtagaggctgaattctaaagattctggtcagcaaagccctaaatctgaacatgcttgaatcagatgaattctgcaagggactggcacagaatagggaacccttcttgtgctctggacacaaaccctaagccaggtgtacctggacatcattttctaggatgcacaaagggtcttcattcattaatgccttgcacatgtcagaagggaagagaggctttgggcctcagccttgccattcagacccagctccttactggtacaacccttccatatcccttacttccagggcctgggagcatggtctgcaatgcccaatcatgtctggatgtgcctccaggttcagacattactatccctgctttttctggttttcatttccttttcttgtgtgctaggcttttgaaatacatattgcagccacttgttgccctgttttctaagctgccttgaactgctgccagaggctgttgccagaggagctaatgactaagtcactctccttttggcctctggcaggactggaaatccacttggggatggggtagcaaaggcccagccatcctgaaccaatcaggaaaccacaataaaagtgccgaccagggagtcagtcactcaccctcaaagctcagcgctgagctcagcatggaggtgtccacgaggctggggatgctctagtttgcttctgcagaaccacatcagaagcagagactcaggcacaaaggcaggaccttcagagaagccttggggggtatcccagggtcagcaggaaagagaaactcactgtgtttctgagccaggaaagacagagaacagcaaagaaactccaggctgtgagccaaagacggcaaacccaggtgaagtagattatgaataacaataataaataatagttaacagctattttgaacttacttcatgtaaggccttatccaaacacttttaaagtcctacctcattcagttcttccaataaccctgtcagataggctctattatttttctcactttcagaataggaaactgagtcacagatttagtttgcagtggcccaatgttgtcccagtgattccctcttacaggacaattgcaatcctcttggttagtaatcctgatttcaaaatgcatttcccagttggtttatttgttcaggtgtatccagcacttgtactgagagctcaggatagagaagataagacagtcctggtctttgtctggctgattctgatggccacagcatctccagccacccattttgacctgttcttgttttcacctttgctttccattatttatgggggtttatagtacagtaaaccattaggttggtgcaaaagtcattgtggtttttgcctttaatttcaatgtcaaaaaccacaatgacttttgcagcaatctaatagtttctattttctgcccatctcctacaccttcatctctcttggatttgccatcacctagaatgtgcctcttccctatctaccaattttgctcttttgagttctgcctgtcctccaagtatcacctacagtttccaatgttgctgccttcattaagcttttcacaagaaccccaacctcaggtcttctctctctcctctgaactgaggggatgaacactttgcagcaagtttagagatttttacctcatacttccttgcattgtccatttcctttataactgaagagaaatggccgtatcttatcactctttcagtttcttccatatgctattatggagtagttaaaaatagcttatggattaaggaaataatttaacaaaaaggatatggtgggcagcttctaagagggcactatgatccccacctcctggtattcacgtcattatgtaaccttctccccttgagtgtgggcagaacctgtgactttcctctagccaatacaatacagcaatacttataggctgccacgtctatggttaggttatgtaaagttgtgaattccatcttgttagtagactctcactggctttgaagaagcaagcatccatgttgggaaggcctacctggcaaggaaatgagggcagactacagccaaggagaaactgaggctctcagccccacagccattaaagaactgagtttcgccatcaactccatgaggttagaagcagatccttcacagtgcagccttcagatgagacctcaaccctggctgacggtttcagttatactttgagacaccctgaaccagacagcccatgtaaactgtgccctcgttgctgacccacagaaattacaagatgataaatgcatgttgtgttagtccattatatttgtggtaatttggtacacagtgatggataatacaggaaggttcagcagacaaagcctttttggaagaattcaaatggattgaaaagtataactaaggaaagcaagagagtgaggtgacatttgaggctggggaagtgtgtgagcaatggctttatggaatgttcacaaaagagttccaggcagacctggagatgtagacaggaagctaactggggaggccttaaagcaaaaagaagaaaaaaaataccaagccagaagaaagaaaaatggtgacaatgtagagaaattgtgatagtgaggggatacctccatgaacattgagaatgagagaagacggagatgctccattcataccagatggcctttaccttcgtataaatgcaggttctcaggttatctgctgaaagcaagagaggaagagggctttttagtgtaacaatactattgatgacaataagtcaccattttacatctcacttaggcctcacagcctccttatgagaggttttatttccatctacactttgtagataaagattaaaacattcagagagattaagttacttgctaattgtcatccagttcagaagtggcagaatttggaaacaaactcagatcctagagccatggtgtcatactgaggttctggaacatttttctgcagatgctgtggggaacatgctctttgccagtgctgttttactgctctgtgtcaagagtgctttgggaacagtgacagaaaacatgatgggtttagactcagaaggaggaagtggtagaaaacatgatgggtttagattcaggaggagaaggtggtacaaaacataatgagtttcacctcaggaggaggaagtctagcaggagatagaaacaggcagaagagaggcttttttattgagaagacatgaagtaatctagtgtatcaaggtaaatttttcaggaggtggaagacaaccagtgtgtgaaggttgtagctactggagcatctgcacacaggaaaacacgagcttcccagagacttcagatcagaaagcctagctgagctgtgaaagaagacggaagatgagggactggctccaattataaagtaaatcatagagtaagatggtgaatggagatatgtaggtaagggatacaggaaacctgtccacttcattccaataaacattgatatacatgctcatagattaattgaatctttcactgtgattcccggacaaagcagtaccatctctgaaataaaagcctctattttctgtttccatctttatgagtcaagcagttgttatcatgtttttagaaaacaaatgtaggcttcaaattcgtagttactccggcctattcaatgaaaacaacaatcatatgtcaaaatgatacgatggcatgatggttcaggatggactgagttggcatgagagtttaccaaggaggatggaagcattttccaactttcagaaaaagagtgatggtgtgctcacctttttggcataatcctggggtattgagaaccagccctcatgcgatactgagaaaaccactaagaaggcagctatgacgtttctttcctatttttttctcaatgcctagctctgtgtttggtgcctaataggtgacttataaaagcatattgacagaatgaatgagtggggaataactttgtatgttgctttgctcagtccctttgcagtctattttagataaacatacattctagtgagtaccaggaattagacagcacatatgcagttcagagactgagggtctgagaagtccagactcctctcccagctctcctctccacttacagaggaaaccaacctcctcttctccccccacctcacagaagagggaggccagctctaatggccttggccccagtttgcttgtataattaatgtgggatttttcctcctctagtaaaaaatgaccttgtcaaacaagagacgacaaaatcttggttactgagcaactgtggactccctgctgggatggcatcctgggccttgcaaagagaaatctaataaaattggtgtcaggggctccctgggtgccagttcccctgctgcctgaccccacaatcccaatttattagccaaacccaagaaagcagacaaacctcactggctccagacaggagacttccaagtgggagctaatgtgggggctggggctaggcttcagcaaaaatgacaagggaaatgacaggaggtgccagccgaccagggagcctggggaagccttattcagagcatcatgctgccttgacagggccggtttcaacttggtagaagaatgtgttagaatggcccattgggaaaggaagtgttttttctctctttgtactgttatttgcagggccatggacagcatgtcttgcattagccatgttcctgggagtcagcaggcgtcagtagaggaatagccaaagaaaaatatttgcatgtggagttttcattttgtaaactgagcacttcttcaagtacaagagagttttaagtgtacagtcactatttacccttccacacaaccaaaactccctgcgataggaaacactgatttgcattgtacactagctgcactccttattaactaaatgatcttgggaaaatttcttaacttcttcacctataaaatgagataacagtactattctcataaggtgaggattcaaatatgagaaaaacagaataaacccacaaaacgatagcaagtcactataccagcaaaaatcagctagaaaaagaaagtctatttcaaatagcaatgagaactctaaaatgtctaggaattgtcttaacaaataatatataaagcctatgggggaaagtgtcaaaactctaataaaggacataaaaaaccatctgataattttaaagatattccatgcttatgaatgagatgtcttaatatttaaagttaccaattatcttcaaagtaaactatgaacttaatgcagtgacaacctaaatttcagacagatttaaaaatatctagagactagaaaaatgcacacaaatgtatatgatataaaaatataaaagcccataaataggtcaattttggaaaagaagaacaaaaaagagcaatgtactgcactaaatgttaagatatattacaaagtcatagaagtgaaaacagtatggcagtggcccccaaaatgaataaacacatcagtggaacagaaaggaacattctcagggagttatatgcatacctgagcaggtgatatatatatatatatatatatataaaagatgacaacaaaaataagtggataacattttatctgtaagttttaactgatggtgctgagaaatttgacttaccacgtggatgacaatggaaatccttttactacaaataaaagggtgtccagatggattaaagtccaaagtgtaaaacatgaaacttgaagtttaaacaaagaaaatattattaagattaggagcacagaaggatttcttaaaaaagtctcaaatatcacaaatcatatgttgtcaaagttaagaatccctgatcataaataccatagacatggttaataaacagttgacagattggcagaaattacttgcaagttatttgcaaattttaaaattagcaaaggacgaatatctataatgtataagaaacacccaaaagtcatagaaatagaatgaagggaaaatgtatgagtaggcaatacacagacaaggtagtcctagtgaccaataaataaataaaaagatactgaaactcattagtaaacagaaatatgagtggaaaaatgcaatattactttatgccatcaaattggcaaaagctaaaatagttgtataatgttgggaggaatatgggcaaacaataatcttttactttttattttttatttttttaaattttatagaatatatttatttagtggtaagcatctttaaattttatactaaaattttccttctatagaagatgatcataatattttcttttttttcttttattattatactttaagttttagggtacatgtgcacattgtgcaggttagttacttatgtatacatgtgccatgctggtgcgctgcacccactaactcgtcatctagcattaggtatatctcccaatgctatccctcccccctccccccaccccaccacagtccccagagtgtgatgttccccttcctgtgtccatgtgatctcattgttcagttcccacctatgagtgagaatatgcggtgtttggttttttgttcttgcgatagtttagtttactgagaatgatgatttccaatttcatccatgtccctacaaagacatgaactcatcattttttatggctgcatagtattccatggtgtatatgtgccacattttcttaatccagtctatcattgttggacagttgggttggttccaagtctttgctattgtgaatagtgccgcaataaacatacgtgtgcatgtgtctttatagcagcatgatttatagtcctttgggtatatacccagtaaagggatggctgggtcaaatggtatttctagttctagatccctgaggaatcaccacactgacttccacaatggttgaactagtttacagtcccaccaacagtgtaaaagtgttcctatttttccacatcctctccagcacctgttgtttcctgactttttaatgattgccattctaactggtgtgagatggtatctcattgtggttttgatttgcatttctctgatggccagtgatggtgagcattttttcatgtgttttttggctgcataaatgtcttcttttgagaagtgtctgttcatgtccttcacccactttttgatggggttgtttgttttttccttgtaaatttgtttgagttcattgtagagtctggatattagccctttgtcagatgagtaggttgcgaaaattttctcccattttgtaggttgcctgttcactctgatggtagtttcttttgctgtgcagaagctctttagttaaattagatcccatttgtcaattttggcttttgtttccattgcttttggtgttttagacatgaagtccttgcccatgcctatgtcctgaatggtaatgcctaggttttcttctagggtttttatggttttaggtctaatgtttaagtctttaatccatcttgaattgatttttgtataaggtgtaaggaagggatccagtttcagctttctacatatggctagccagttttcccagcaccatttattaaatagggaatcctttccccattgcttgtttttctcaggtttgtcaaagatcagatagttgtagatatgcggcgttatttctgagggctcttatttttattaactgttgttaagagaacaggctgatgcaaccagaaatacttagtctaatgatgtttgggcatatcttatgatgctgcaatctcactcttgtttgtacagtatatttgagagaacatctagccccaatttcataagggaacacatagaggatattcatcaccatggtgtttgaactagggattgtcaaatatgaccaatgggccaaatatgtccacaggcatgtatttgtgcactgtctatggctgcttttatggtataacagcagcaaaatccttaaaaccaagacttcagaacccccaaagccaaatatatttactgtgtcactctttataaaaaatgtttgctgacccctggtttaaagtatcagggaacattagacaacctagatgttccattgcaggggaaaagctaagggaactataatggacacacagtatggaatattacgttactgttataagacattaactacgtgagacatatactcataaatgcagtaagatccgaatgtaaggaagaaataaacagaaccagtatacatgaatatacttttatagaattaaaaatacctacataacaacaacactatacaatttgcaaaaatatacaaaatattaaggtatcatatcaaagacattatggttgataaaatgaggagaggggacacatgaataaaatacaccatgagagagtctttgtatgagtcttacaatagaagtatgctatgaaatcagaagtgtgattcactcatgcctctatgcctgagattcaaaaaataaatgtggaaaatgctgagtacaatgctcagtacactgtgattttcaaaaagcatgcattaccatcatcatcatcattatcatcatcattatcaccttattattaatcttttgaaagtgaaaccctaaccatggagctaaaatcaagaaagaagaacatgcttaagacaatcttgttgcatcagtgagcctaggataatcgattgaccgtcaccctgtttagaaaaactctttaggggtcaaaagagttttatgactccttttatgactaaaatctgtgaattgattgatggagagggtcaattgtttcctgtcacagtcactatttgcactcgtcaatatttctgtttctttgccttccagattggctctttatcctggtcttccttttagttggccagagacttgtgactagttctgactgaggagctgttagtgtaagtgttgtgtgacccttgtggaccagggtatcagttgctctttctagaccctccagaactctctatcctgctggcactgtggctagctatgtctgcagtggtggtgtctctttagtccctagaggaccacaacgaccagagctaatgcagtccaacaatggatgtgttgattgaaatcactgagatttgggggattggttgttacccagcatagcctagcctatacactgactgacacaccttccaaattttcaaagacctggaagcttaaaattggaaagaccctcaaatgccatgcaatcaaaaccccaacatgggcagagggagtgaatgtttagaaagagaggctcagccctagtgataaagagcccacatcctcctcaaaagctcctgtcctttttcactcacctcttatcattattgagattcttctgtttggagccaaatttcacctcctggccactttgactcatttatattagttctgcctttatccctgtttcacacaataattcttcagctaggggagtatggtagtcagaagaatggtcccctaaaagatgtccatatcttaattcttggagcctatggatttgttacctcaaatggcaaaagggactttgcagatgtgattacattacgggtcttgagatagatagaagattatcctgcattgattgagaaggctcagtgtaatcacaagggttcctataagagggatgcaggagggttcgagtgagagtaggagctgaggcagtggaaacagaggtcagagagatgcccctgctggaagaaactttgagccaaggaacccaggctttctctagaagctgaaaagaataggaacagattctctgtaccccctctctaccagcactgattttagccctggaagacccacttcatacttctccacaaactgtaggatataaatttgtgttgttttaagccactaagcttgtggtaatttgttacaagaggaaaagaaaattaatacagtgagattaccatgtttctttgaattttcagtttccagaagagttgccttttgctacacctggtttctttttcagtctggtcctctgatattttaaaaactggtttcatcaatccagtttgtaaaaatatgggatttctagaactttgtttttattctggttgtgacttacttaagaaaggaaattgtagcaaaattagcactgcctagaacagtcaccaaagcaacacagactctctaagcagttcattgaacttggtacctacccagactctaaataaatatttttcgtagttgatattgctgccatttagacagatctccccaattccatagtccatagttgttcagttgatttagggggaattaagtgtggattttattgattccttcagattaccaagtaagagttagttaattcatgagtcatgtatttggtcaaaactaacagcattaatagtctgtgttggaactattaatgagaattcaagagtctgacaaaactttgtcagatttgagaaacagaagaacctgcctttttagggcaaaaccatattaatagcatttttaaaatagatttgtatgttctagggtccttatcgaataaagcacctattgccttatccaaatctcaaaacaatcatatgaagaagggagtattattattattgccgtttttaaaacaacaaaatgtcattaagggttgcttaagcaattcacccagttttcacagctagcaaatgagggagctgggctgaaaccaggcagtctgactgtgcagctggtgccttaaaaccatgctacagaatcactcataacgttatagctgtatggtccttactggcctgtggcttagatgtgtcttattccaggtccagaggctgcctggagtatgtggacactgtccttggaaatgaaatgacttgtcagctcatttttgatggatcacatttcttagaataagcacaaaatattttccatttgctaagtgattttatcatgcctctctgggctggactttggaggggagagaggaaacaggtttcatggttaaagcctgagacatacctttcaggcagtcatgggtgaggggttagtaatgggtgacttcggcccctcttcatgctcacctggcacaggaaactctgggtggtttggctccagctcttgaaaacaagttccttgtttgccctcctgagttgatggtctggtggagaatttgtctgaaggaatttgttccaggaaaggtccagctgcatttgacaggaaagggagaaaagagagaacgaggcataaatctctggccttctgcctcttgcttgggaatctgtcctttccagcctgtaagtatggaaatgagtaactggtgagtctcaaagctttgaatgaacgtcatacccctgggcagacatgtgggccccctgaggaaagaaatgtcccttttcatagaaaacatctatatccaatattaaaaagcttacattagccattgggcacatgaaaaaaacattcagcatcactagtcattaaggaaatgcaaatcaaaaccacagtgagataccccttcacacccacgaggatggctataataaaaaagacagacaaacaagtgctgctgagaatgtagagaaattggaaccctcatacatggctgatgggaatataaaatggtgcagctattttggaagagagtctggcagttccataaaatgttaaacatgggttaaccacataactcagcaatttcactcttaggcgtataccccactcttaggcgtatacccaagagaagtcaaaggttgattgtagcctcttgggatatctcagccatcttgataatcagtgtccccacttttctctccccctcatttatttaatgttgtatgattccatttttaagctgctgataaagacatacccaagtctgagtaatttataaagaaaaagaggtttagtggactcacagttccatgtggctgtggaggcctcacaatcatggcagaaggcaaaaggcatgtcttacatggagggagacaagagagaaaatgagggctaagccaaaggggaaatcccttataaaaccatcagatctcatgagacttactcactaccaagagaacagtatgggggacacagcccccatgattcagttatctctcactgggtccttcctaccacatgtgggaattatggaagctacaattcaagatgagatttgggtggggacacagccaaaccatatcacatgccctattcactaacgataaaaatctgtccaagatgaactaccagctgcccacctctcaaccccttccactcagcctgcttcacccagttattctgtctgcctggccctggaacacttttgggtttgagatggactcaaattagagagtagcattttgtgggacatcacaaagggaaaatgggacactaactaaagccaatacccctgtcattggcagctatcagaaatgaggtgtgggcctcaaggcagagtcagagtcatggaattagaatagtggatgagaggttgggacctagatttcagcaaacaataatgaagggcaaaaggaaaacaaacttctccaacataaaagagaggagtcaagccctgtgggcctgatcaacagctggtccttagtgaaaaaagacatgagttttaaaaagagcagaatatgaagtttcaccttagatcctgggacttgatccttggaacttccgaaggtttttggatccttggaaacccttaggaaaagcagcaactctctttgaagggttttctctgttggcaattattaccttaaagtagaatgttaatagtcagccagaagccagttccaagcaatccatcagacatgtctacatgggtctgaactttactcataagcaaggctaaaattctgtcctatgggtctgttgggtcccatgttaaccaacttgaaagtatcagcgaagggatgacaggtgtcatgtaattctacatcctgatgtttccagctgattgattgatagaataatttctagtttcatttcttcaagcttttgtttttttcaatcaatctcttctcaaatccaaaggtaacttgtattctacaattcttatttgtctttcctgactgtataaatgtatttctaagatttaccacacacattacttacttatgtgtaataggtaaatgtttaaaatgtatttgtctgacagatttgaacatgcctcctctgtgctttctatttaccatgtattttctttgttcactccacaccccatcctatttcctgttttctcttcagatgatccagcttattttatgttttcgtgtttgtttttctttgtcgggaagttatatattgcctactattttagtagttatcattaaagtttttttatgtgcataatcatcttaacaaagtcttaaattaagcaacctgtctctttcttagcttccaaaaaaccttaaaattctttaacttggttttacccactttccattttcatgctacagcttctagtatcttatttaccctatgatctgctgtccactaaataaggcattgttattattacaattattacattttagagcaattttaaaagatttgccattgcatttaccaatttctttttaacattgcttcataatacttcttccttgttagatcaattttccatttttctgaagcctgtcctggtgaaagaaagaaaccatttgtgatttgtgctaaacatacccatcatcttccataattgcctcagcaattttgcagaatatgaattattatccccattttacaaattagaaaagaaaggcacagagaggaaaatgacatgctcaaacaaatcacaatactgatgtatttcagatgcagccagatattttgataaaatacatctttgagtggcgaaagaagcaatttgcttagagttaaatagaaatataatgggttcatcaagaaacaattggggggttgcagagtacttgtagacaggccaaagtgcttaaactcaagtgatttgtgcaaaagaaaaatccattattctgaaaaaattgctttaacagagaattttcaaagcataagagttgttacattcagcaagaaaaagggagggagtggtgagggaaggtaacgttatcacaatgactaacttgactttattttccccaaatttctaaatcttacagtttaagaggaaatgctttggggagagataatctttaaaatttgttcactgcattggtttttaaattttcaaaagcatatctgaattaaaggatggataagacactttacatcaaaattcactcagggctgatatgtgatgactggtgatgtttctaaggataacattatgaaattagttaagaacaggaaaaagactttaataattcattatcagtcattacctttggtggtgtttgttattgtttgtaacctgaagacctatagggataataataacaatagaaatgataattacatttttaaaaaataattcaatactaagcagattacagacaagcaacacgattagacaggcagcactcaagataattcactcagtctgttgatggattccacacttctcataagcataagattcattttcacaattaaagctagatcattaaaattgcagcctgttggcagtaacactttttgcagcccaaattctctttaaaacaaaacttgtagtcattagaatggtgacaatgtgctgaaaacacccactttggccttccctgggcattctgttcttcctggcttgcacttcaacaagttgacagccttattttgtaggcaactttagtagattgtcaactctggctaccacctatcctcaggtaggatggagcagaaattttattcccttaaaaaaaccgcatcttgcctaattcaagggactgttgtgttgaggattcagggtgcaggcacctgctgcccacaggcctttgggtggtgtgagaacaccagaatcaggttaccgtcactgagttgccaaaccacattctgattctaatgctggccagctgtgtgcccttgggtctttgactcaatctttctatgtcttggtttcctcatctctaaaatgaaactgcggtacccaagccctaggactgttaagaaggttcagtgaatacaagtgaagctcttcctgatgatatctcaagcaccttaccctattagtacacatgaatcttcctcattattggaaatgattgattgaagaccagttttatctcagaaggctgagttttcacatgaagacttttttattttctgtggtttagttacctctatacagtggtcaacaagaaagttgcaaatggaatcaaattcacaaaaatacatttcatgaattaaatattttcatgggctttgccaagggcacacaattaagctctgtgttgctcgatttctgggtgctcatgcatctgctccttcaaaacaggttagtgctttgatctgatgggccagtgtggacaacgatgctgggcttgtgagtggcctccgtacacagagctcctgaaatgcaagaccaagtaggccaaaatttcaggctgtatatgttcaaagctttgctaaaactcagtgtggcagaccttcagcttctactctgtaaaccctaaaggccatatagcagttaactgaatgttccagaatttccatgatgtgtttctgttcaaaaattcagtcttaaaatttcgttttcacttgaacttgacagcccctgaccttgtattttggagttggaaaatgtgaaccaatacacataatagctaattcccagtggggattctagacaaagaagataacgtactagagtgaatatttgttatctttgtaaatattatctttgtaaataaacaatagcaacacaaagttctataatgctgatgacttcatgaacaggaagaacagaggaagaagggaaaagggatgaagtcttctagcattggaccatccagtgttgtagtcaccagtcatatgtggctagcaagcacttgaaatgtctctagtctgaattgaaatctgctgtaagtgtaaaacgcacaccagatttcaaagaaggagtttgagaaaaataacagaaaatgtgtcattgataatttttgtattggtttcttgttgacataatattttgcctatattgggttaaataaatgatgctactataattataaacgatgctactataattaattgtattcacttttcactttttaaatacggccaccataacatttaaaattacatattcagccaggtgtggtggctcatgcctgtaatcccagcactgtaagggcaaggtgggaggatcacttgaggtcaggagttcgagaccagcctcgccaacatggtgaaaccccgtctctactaaaaatgcaaaaattaacaggatgtgctcacttgttcctgggaggcggaggttgcagtgagccaagatcatgccactgcgctatagcttaggcaactgagcgagactctgtttcaaaaataaataaataaataaataaataaaagtacatatgtgactttcattatatttctgttggacagcttcctttaatacacaaagataatttcctatttattgtatgtaaatagtgtcttcagcagaatggaagcaatttatacttatttatttacatatgcttgccaaaatatcaatttcccaaaaaacatttctcacgtagacctgaggtcaacctaaaccctgtttctgttccacactcacaaattatgaattagtgaattctaaatgaaagcaggcccaccacatttagcacatgagataaagaggaaataatgcgactcatctgtaagcttaagttaagtttggtttagaaaagcaatgagaaatgtgacagtcccactctttaaacagacaaaatgaaaaatcataagcaaaacaatctatgtgattgtatgttctcactcacatgtgggagttaagctatgaaaatgcaaaggtataagaatgatacattagtgtttgaggacccgtgggggaaagggcagggggtggtgacggataaaagactacacattgggtacagtgtacactgctcaggtgatgagtgcaccaaaatctcataaatcaccactaaagaactcagtaaccaaatgccacctgtttcccaaaaacctattgaaataaaaaaatcaaaattaaaaaaaaaacctatgtggatttaatgtatcattcaaagatgcttcagattttgatgacagagggatgtggcagctatttaccattctggtacctgtaagtacctacaggttttaggttttttatcctaggatgcttccttcattcccatgagatgtttcagtagagaggagccagcgcagcttccagtcagagctggagaagcgcagagactgtacagacagcaggataccctggatcaggctggattaagttgcctgtctctgttctctgcatctccaatccattgagaaccttcattgaaggaaattctcttcccctagcctgtgacattctgagcttattctgtgaattttcttcatgcctacacctctgtgcaaatgacagtaatcaagcaacctggctgtacagtgtttggggagaaaagcacttggctcaatgacatctgcagcctgctgcctatactgaattgctgtgtcctgagccaaggctgaggatgcctgttacaataagacctcttagcaagagacggcacactgaagacacagctctttgtcagaagcgatgaccagaggtaagacaacagtgttccagggcaccaaagctggcatattattgtacagccttattgttaaatgctcaggaaagtaacataaaatgttccagaaagcatatatatgatggctctaggagtcagtcagaggaagagattgggaaagggtggagcacaacagctttcaagcaaggaaggcagggtggaggtagctggcagtaatatcagcaataacactgacagtaaccactggcctattgagtacttactttgcatcagatactgtaattgcttcatgtgtattggctcatgtactttttataaccatcctactgttctctctattttatagacagagagctttggatggttgagtaagttgcctagtatcacatagccaggacataggtaggcagatctaggatacaaacgggagtctttctcactccaaagtctctgaattttccactgtgccaagaggacaggtcatgaatatattctatcctcttattcttcaccactttgagaaatttgtgagcattgcccatgtaattactattcatctacagctctagataagtggtctcaaatgagccccagagaacatttggcaatgcctggagacatgttttgccaccactggggtggcgggtgctactagcatcaagtgagtggaggctaggggagctgctagacattctataacacagaggtcagcccctcacacagaaaagtcttagccagccccaaatgtcaatagtgccacattgagaaactgcaccagaggaaaggcatggaaatcaatgcagaaccctatctcatcctgccccatctaggtcactccatagcttggttggtcattcattcattcagtcatatttattaagcaccaaccaagtggccaatgccatgttaggctctgtggacatacattattaaaacatcaaatgaagttattcaatatttgtcaaaagtatagttaaaacccatatgccacaggtctaagtagtatagaaaggaggatatttcagggaagtagttgatacacaaatgttttgagaatccaacatgctgctttacatgttttaagaaagataagaaagaagattaaaaaatatttacatatcagtgcatctttatttgaagttaaatctatacttagtctgtatcctgtcaatgctatgttttcgtctaactgagtttactaaaatgtacaaagagctttcctataacatttaggaatttgttttaatgtatctacaaagaatattgacagccttcagacttaagtgtcagtcattgaaaattatatttgctggagtgtttgttgtagaaaattacatttattcacttacaattgaaacaatggctgtcataagaggtgaagtgtgttcatctatcttgtattaattagcccattgactaaggcttccctaagcttgtaattaaccaagtctgtctgtgagaacagtggtattaagctagcaacacttttgagagtcttctttgcattgatttatgcaaacaaacatttaaaagtaacttgaagagattaattttgtaagacatctcacaatcttccacagcacaaggaattcaatagttagaaaaaaaaagtgtttctaaactcaaaagttaactgcttggcaagggaaacaaaaaatcaaagaaataatcacaataagaattaaaactataactgtcatggctacaaagaaagagagactcaaagtataaggagtaaacagaatggggaacatgacatggccagtggtgtggagttgggggaggcttctctgaggaagtggtatttgagctgagaactcaccaaagtgcagaagttattccaggcagagggaagagtatatgcaaaggcttggagtcagagacagtttggtgggcggtgtgcctggttctaagggagtgtggacaagtgcagtgtctgatagtcagaagggtaggcagagcttgtacattgtgggtccaggcaggccacattactgggtttacttcttttttatattgacatcaatgtggaataatcaaaatgccaaaatcaagaaggcaaaatgagaatgttcattttgagaagctcactgggcaatgaatggatcattgcaggagctgagtaaaggcaaagagaccaactagcagataattgtgccaaccagtatatagataatgatggttggaaataggtcaatgacaatgaaaatggggaagagtaggtggattcaagagaaatttgggaggtaaaatccacagggctttatatacaatggattggctatgatggcacgggcgagggagatggaggtgtttgttaaatactttttattgggcttaagggtttatatctcatacactggggacagcaaaaacatggctgatgttatggcagaagtttcgtgagcacctgcactgtctcctatgaacaggaaaaagggaaagatcgttctattcccctatagtggtgtacagtattaccaggtgcctaatatggcctttaatatagaggaaaagaaccatcagctctgcaacaggaggggaattctggggcatctgaatatttaactcaaggaattcaggccctgccaaatctcagtcacaatgcaaacctttataccccatttccttctgtgccaataatgacatttggaacaggagggagaagtctactgaaaagcaagatcctcctcagcaagcacattggtcaatccctgctgggctgtctgtttcagctattaatttgcatgggctgcttctggactgattctgtgatggatctgttgccaagatcagccattaaaagcttacttgcatttctgctttctagacatgtcatatcatgaggccaagaaagagtggacaggtacataagctatggcctgaaatggaaggagatgagtctgttgccaacagccaaggagagtagtaggggtgactagaggggaggggaggagtggaaatcaggtttgaaagagacaaggtctcaacctgagcccaggcaaaggacagccactctctaaagtgtggcagcatgggtttctagaagaactttggagtttgacctcggctcatatcccagctctgcaagaagtgagcttaaggcaagtcatttcacctctctgaaccttggtttcttttgaaaaaaaaaaaaaaaaaaaatggaaaccatcctgtctactttggatggtggtgagaatgaagtgatgttgccacaagcattgggaagcctttggcttggctccaggtctgtctggcaaacacttggttttaaggaagtaaaggccacagatgtaagcctaccaccatgcttttgctcactgacttcctcccactatcctagaccaaaaccatatggacccctaaatactcacagtcttgagttcaatgcattatctgaatcagtcagtttctccattgactgaaggcaaagtggctgagatagacatttggatggaccttcctgtataatgtaaacctatctctctgaatcagctggtgaggtaatggggtgttagtcacatgcacactgagttgttagggaatattaaatgacatcactccacttgttattatttcatctgttaaaattaggtttctgcctgaaattgcttagtgacaatactcctggactttcttcaaaagctgtaaagatggcctctcgaatttagaaaacgctgaaattgttggaaagttttactaagctgtttagaatttaaaacagcagcttccagcaaagcagttgagaaataaacagcatctcagggtgttttccagttccttcatgaggcaataactcaaaatcttgtcacatttggaaaaggagacagatcaaatgtctaaacattctaagtgtcttcaaagaaaatacttctccctctggaacagtgagtctggtattaaacaacatgattgcttgatgagttttatcatggcgtcttagacctgggaaatatcttacaagtcatgtctcagtctttttcccaagtcaatgaaaatgtcatttgctttataaagaatgggtatttcacaagtttcccttgtaaattttttaaaggctaaattcattcattgcaaggaaactctggtagatgtttcattcccatttttcactttcgtctgcacctgtcctgtccaggtattagaagagacaatcactttctcatctgagaagatcctcccttctttctgacatggtcaggttctattttatctcaaagcttatcttttttataacctcctttgtgagactctttccctacctttggggaaatcacactcctacttgtactaagtaatcttgcaacagtgtctatcccctctcatcattagtatgtgtgtccttgaatgagtttttcagtgtacagtcataatcctttgaggtttcaggtggacaattagtcctggctattgacactacaatgctggaaggtactaaggagattgttaaagcattctcactttactgctgaaataaccaaaggccagagaggagaagccatttacctatacatacatggtgacataagtggagcacatactagaccttctgactttcaattcagctttttttcagctatgatgacatgtcaataggttcgcaattggcccctggttcttcagagacattcagtcagttcttattgagtgaatagatactgaatgagtaaagaggaacattttcttaggaatttagttttaagtacaacatggatgccatgtcagatgaaagcactcacaacttcgtcatagataaatgtttatggaaggccccagtgatgggattgaagggtctcatcctggaactgactggagatcggtcaggaagaatcaggaagaatctgattctatttggattccaaatcttgtttgccaggtcatgtatgatgtgaattcagaagtcaattaatttactaattcagtcaaagccaatgattctggaagaggtgaaatagcattattggagttgaggataagaagatattttgaattctcagtagctcaaacttgccaggggcttcctattctggcccaggtaccatcaccttgggaagacttccttgtcagctgccaaaatctcacttcttccttggcccctgagaatccatcccttgctccaatagccagagctactaatatccccttacctcagtgcagtcaatggaagtgattggaaactctttcctctacttacataaacacctgcctcaatacctagcaggtatctacttctgcctacctagagagaagtggatacatttctggatttgtcagaataaatttaaataaggctgaggatccattcatggaatcttgtccctctggtgatcctcaaagcaattaacaggggggtataaaaagtacttggatctttgtgagcaaacagagatgctcagtgtaactgtagcttgagtacaaagagtaaaactgtttaatttgtgctgacactctagagaagtcaagggtagagagatgaccgttgtgtgagataggaaaaaacaaatcatgtttcttactctcatactcaacgcagtacacagaacacttctaacatcaaacatgtaaatttttacccacacattaatcctctggcagaacacccactaggtgtcccgaaatttaattaaattctgactatctacatttagttagactcagatcccataggttaagggatcagtcccacaggactgctctgacccccccacccccgaccaaacttcagatgccaataacaaactcaggcctcaggaacatcaggctgactagctatacaggggagatttccacaactctctcctcggcttccatcatttgctagagtggctcacagaactcaggaaagtgctttatttacactcattgatttcttagaagaggtattacaaaggatgcaaataaacacccagatgaagaaagaataggcattgaacttcctccaggaaatctccatgctttcagccatacagaagctctcctatagcttggggattttacgtaggcttcatcatgttaggcatagtatattattaactaaatctgcagctccactccctttctcagaggaagggagtggagctgaaagctccaagctcataatgatggcttggtcttcctggtgcccagtcactatccaagagcacaccaagagatgcctcagaacagaaaagactcttattactcaggaaatgacaagggttttaggagttccgtgctatgaactggaggcagagaccaaatatatatttctcattatattacagtattacagccatgttaatggatggatgaatgtgtggatggtttagacaaattgttctatgaacgaaagcctttcttgtatcaacacagaacaactgacttgacttttcagaattatgagcctaaataatttattaaaggctaggaagacaatgaatttgcttaactcaaacttactgtctttcctagacaatttttattctcttttacttctagaaattatatcctatcctccatgcccttataacactctgtagtttgctcagctacatttatgtctttatggtgacttgcccatctgttttcatgaggctgtgagctccttgatggcagagactgtctttttttctttttatctatgtgttattatcgttcactttttgttttaaaataatttcagaattatagaaaaaatttaaaagagtatatgacctttacttagattgtctgcaaattttaaaaatgtactacatttgcttaccgttctatctttctatctacctatcacctatctacacacacacagacacacacacagacacacatacacactttattatgaaatgtttaaatgaaggttgcacatgatactcctttacctctagatgtttcagtacgaatttcctaaaatcaagggcatcttcttatgtaatcacagttaaatgatcgaaatcaagaaattaacattgattcagtactattaactagtcaatagaggccttattcaaagtttactagttgtcccactaaatccaaggttccaagtccaggatcttatccacactcacaggttgtatttagttgccatgtctgtctaatccatcatgtccttttgttactcttgaatctggaacagttcctcagcctttctttgtcttttataaacttggcacatttgaaaaggagagaccgggtatttagtagaatgtctcttaatttgggtttgtctgaggtttcctcataattatattcagaccatgcaactttggcagaaaaaccacagaagtcatgctgtatccttctcggtgcatcatatcatgaggcacatgatgttgatttgtcctgtttttttgtgatgttaactataattgcttcattaaaagagtgtctgccaggcttctccactgtgaagttactatttttctctttgcaattaattagtatcttgtggggaaatactttgagactatgcaaatatcttgtttctcatagtactttcacctactaattttagcatccattgatgatccttgcctgaaacaattattactcttgtggttgccaagtggtgattttctaatctcatctttccttctatatttattagttggaattctgacatgtcttttccatctgtgtcctcattgcttaggtcagtctggtccaaagaaggtattattttgtgtgagttgttctcgttagttgcttagtgttattataaaaatattacaagcaacatcattgttttaaagaagaaagcaggcaaacatggtaaattgtgctattcaataaactttatatgaattgtaatttaaataggtcttttaaaaattagcatagacaaaggcactttgtaaacatcatcagaatacataaactgtggtccaaaaccccttacataaatgagacaagtctccaggataaagccttccatcctctctcaagtgagtgggtgtcagctgtctcggacatagaggactgagtcatacctgagactatcctttgcttctgggtcagcaagttacccagaagaaacttaacattgtgatgacacacttgagaaagattggacagttttcacagacagtttcgtcttactctctgttcttcaaattttagtttttatttctccataacacaaaaacaatggggcaaatttatttgctgctcctagaattctttgaatttcaagatatggatatattgttacatttctatatacatggtaggaccacaaaaagggttaaataaaagcattacatagatactacttactcctcagggtcctacagacatcttctcccctatcctgtttcttctttctcagcctccttgtgcagcgtttctttgtcctaaacttgaccttagctgctgactagtttctcccatgactcagccaaaatactgcacaagcctttaccttcagtcctctggggttttgcatctgggcaagtggctctcttttctgggcaagctctgatctttcttcctggaaccctccactgccacatctgtcagtttgaggtctctgaccccatctggctttcctcctgggacactggccctctcccaaggacagccagaactcccaagttaattatctagagtcatattgcttccctgtctatcctgacttaaaagggggaaaaatcctgcttccttttggttctccagaataatttagaacttttcagaaagaattacaactataaaacaaggataaaacagagacaaaaaggttaaatagaaaaatagtttttaaagactccaaagttcatatcaaatttagttttaaatacagattatattaagtggcctaagttagactactaggacccacagtactgatcactacaccatccattaattttatcttttagggaaagcccttgggtgaggtgacatctgtttttagttttaaatatttcttggtcccatcttatggaaaaggaaccaaggtatagttccacaatctcatgaaactcccaactcgatgaggatcaaggctatggctgtggtattcacagacaaatcttctgaggctcatataaagtctgtagtagagtaggtaatccaatgatcatgcacttaaattttctcaaaacattctcccacagaactttagcaaattcctgaatttccagtatttaggcaccagaactatatcttccaaactgcagaattagaaaacaaagtctgatgggcttccctttgagggtaacccgacctttctctctggctgcccttaacattttttccttcatttcaactttggtgaatctgacaattatgtgtcttggagttgctcttctcgaggagtatctttgtggcgttctctgtatttcctgaatcttaacgttggcctgccttgctagatgggggaagttctcctggataatatcctgcagagtgttttccaatttgtttccattctccccatcactttcaggtacaccaatcagacgtagatttggtcttttcacatagtcccatatttcttggaggctttgctcatttctttttattcttttttccctaaacttcccttctcgcttcatttcattcatttcatcttccatcgctgatcccctttcttccagttgatcgcatcggctcctgaggcttctgcattcttcatgtagttctcgagccttggttttcagctcctttaagcacttctctgtattggttattctagttatacattcttctaattttttttcaaagttttcaacttcttcgcctttggtttgaatgtcctcccgtagctcagagtaatttgatcgtctgaagccttcttctctcagctcgtcaaagtcattctccatccagctttgttccgttgctggtgaggaactgcgttcctttggaggaggagaggcgctctgctttttagagtttccagtttttctgttctgttttttccccatctttgtggttttatctacttttggtctttgatgatggtgatgtacagatgggtttttggtgtggatgtcctttctgtttgttagttttccttctaacagagaggaccctcagctgcaggtctgttggagtaccctgccgtgtgaggtgtcagtatgcccctgctggggggtgcctcccagttaggctgctcgggggtcaggggtcagggacccacttgaggaggcagtctgcccgttctcagatctccagctacgtgctgggagaaccactgttctcttcaaagctgtcagacagggacatttaagtctgcagaggttactgctgtctttttgtttgtctgtgccctgcccccagaggcggagcctacagaggcaggcaggcctccttgagctgtggtgggctccacccagttccagcttcccggaattcaacaagaagagctaactatcctaaatatatatgcacccaatacaggagcaccaagattcataaagcaagtcctgagtgacctacaaagagacttagactcccacgcaataataatgggagactttaacaccccactgtcaacattagacagatcaacgagacagaaagtcaacaaggatacccaggaattgaactcagctctgcaccaagcggacctaatagatatctacagaactctccaccccaaatcaacagaatatacatttttttcagcaccacaccacacctagtccaaaattgaccacatagttggaagtaaagctctcctcagcaaatgtaaaagaacagaaattataacaaactatctctcagaccacagtgcaatcaaactagaactcaggattaagaatctcactcaaaaccgctcaactacatggaaactgaacaacctgctcctgaatgactactgggtacataacgaaatgaaggcagaaataaagatgttctttgaaaccaacgagaacaaagacataacataccagaatctctgggacgcattcaaagcagtgtgtagagggaaatttatagcactaaatgcccacaagagaaagcaggaaagatccaaaattgacaccctaacatcacaattaaaagaactagaaaagcaagagcaaacacattcaaaagctagcagaaggcaagaaataactaaaatcagagcagaattgaaggaaatagagacacaaaaaacccttcaaaaaattaatgaatccaggagctggtgttttgaaaggatcaacaaaattgatagaccgctagcaagactaataaagaaaaaaagagagaagaatcaaatagacgcaataaaaaatgataaaggggatatcaccaccgatcccacacaaatacaaactaccatcagagaatactacaaacacctctatgcaaataaactagaacatctagaagaaatggataaattcctggacacatacactctcccaagactaaaccaggaagaagttgaatctctgaatagaccaataacaggatctgaaattgtggcaataatcaatagcttaccaaccaaaaagagtccaggaccagatggattcacagccgaattctaccagaggtacaaggaggaactggtaccattccttctgaaactattccaatcaatagaaaaagagggaatcctccctaactcattttatgaggccagcatcattctgataccaaagccaggcagagacacaaccaaaaaagagaattttagaccaacatccttgatgaatattgatgcaaaaatcctcaataaaatacaggcaaaatgaatccagcagcacatcaaaaagcttatccatcatgatcaagtgggcttcatccctgggatgcaaggctggttcaatatatgcaaatcaataaatgtaatccagcatataaacagagccaaagacaaaaaccacatgattatctcaatagatgcagaaaaagcctttgacaaaattcaacaacccttcatgctaaaaactctcaataaattaggtattgatgggacgtatttcaaaataataagagctatctatgacaaacccacagccaatatcatactgaatgggcaaaaactggaagcattccctttgaaaactggcacaagacagggatgccctctctcaccactcctattcaacatatttgttggaagttctggccagggcaattaggcaggagaaggaaataaagggtattcaattaggaaaagaggaagttaaattgtccctgtttgcagacgacatgattgtatatctagaaaaccccattgtctcagcccaaaatctccttaagctgataagcaacttcagcaaagtctcaggatacaaaatcaatgtaccaaaatcacaagcattcttaaacaccaacaacagacaaacagagatccatatcatgagtgaactcccattcacaattgcttcaaagagaataaaatacctagtaatccaacttacaagggatgttgaaggacctcttcaaggagaactacaaaccactgctccatgaaataaaagaggatacaaacaaatggaagaacattccatgctcatgggtaggaagaatcaatatcgtgaaaatggccatactgcccaaggtaatttacagattcaatgccatccccatcaagctaccaatgactttcttcacagaattggaaaaaactactttaaagttcatatggaaccaaaaaagagcccgcatcaccaagtcaatcctaagccaaaagaacaaagctggaggcatcacactacctgacttcaaactatactacaaagctacagtaaccaaaacagcatggtactggtaccaaaacagagatatagatcaatggaacagaacagagccctcagaaataacgccgcatatctacaactatctgatctttgacaaacctgagaaaaacaagcaatggggaaaggattccctatttaataaatggtgctgggaaaactggctagccatatgtagaaagctgaaactggatccattccttacaccttatagaaaaatcaattcaagatggattaaagacttaaacgttagacctaaaaccataaaaaccctagaagaaaacctaggcattaccattcaggacataggcatgggcaaggacttcatgtctaaaacaccaaaagcaatggcaacaaaagacaaaattgacaaatgggatctaattaaactaaagagcttctgcacagcaaaagaaactaccatcagagtgaacaggcaacctacaaaatgggagaaaatttttgcaacctactcatctgacaaagggctaatatccagaatctacaatgaactcaaacaaatttacaagaaaaaaacaaacaaccccatcaaaaagtgggtgaaggacatgaacagacacttctcaaaagaagacatttatgcagccaaaaaacacatgaaaaaacgctcatcatcactggccatcagagaaatgcaaatcaaagccacaatgagataccatctcacaccagttagaatggcaatcattaaaaagtcaggaaacaacaggtgctggagaggatgtggagaaataggaacacttttacactgttggtgggactgtaaactagttcaaccattgtggaagtcagtgtggcgattcctcagggatgtagaactggaaataccatttgacccagccatccctttactgggtatatacccaaaggactataaatcatgctgctataaagacacatgcacacgtatgtttattgcggcattattcacaatagcaaagacttggaaccaacccaaatgtccaacaatgatagactggattaagaaaatgtggcacatatacaccatggaatactatgcagccataaaaaatgatgagttcatgtcctttgtagggacatggatgaaattggaaatcatcattctcagtaaactatcgcaagaacaaaaaaccaaacaccgcgtattctcactcataggtgggaattgaacaatgagatcacatggacacaggaaggggaatattacactctggggactgtggtggggtggggggaggggggagggatagcatcgggagatatacctaatgctagatgacgagttagtgggtgcagcgcaccagcatggcacatgtatacgtatgtaactaacctgcacaatgtgcacatgtaccctaaaacttaaagtataataaaaaaaagaaaaaaatatattttcagataatttctaatggcataaatggttttgcagagttttgaaagccagtgtaacttttagtagcagtttcttatgtacagataatcaactattaataaacttcatttaaataaagtaaaaaaaaagaaaacaaagtcatgtgcaaaggaacaactctcaattggaattaaaaacataacaattgttacagcaacatgggtccatattagctagggtaaaaagcctggtatctaaccagtatgttccttgcaacattttggaaggacacagggaagggtatagcttattgtgcataaaatctgtagacccaagatcaccaagaattgagtgaagacaagtggaaatatggaagcagggggtaatatggtgaatagttgtcttggataagcttgtcaatgatcatatcattttccctaaaagaaatcaagcctttaattactttataatttttatataaaatttgtttttctcttattttgacatacaaatgtggagtcttggattagacttgctgacactgagactttaggagacaggttcagtagctgaagtttcctcatctataaaatgggcacattacttatcatgtaatgctgttatgaagattaagtgaaagagaaaatatcttgcatgaaaccagcctatttgaagaacatgctactatttcactctttcttaactttgtccttctgtctggtggtaggcataattttaataacagccaccaagtttccataccctaatatccggaatctatgaactatcacctccatgattatcttacattttaatgcacagttaactttaacacagaaagattatctgcctaatctagtttcacgagcccctttcaaaacaggattttctccagctggtaacagaagaggactgcagagggtgtcagagagattttcatcataagaatttgatggtagcctatcattgttggacatttgggttagttccaagtctttgctattgtgagtaataacctaaaacttaaagtataataataataataataattaataataataataataaaatttgatggtagctttgaagatggaggggcatgatgagacatgagaagctgaatggtccccatctgacagccagtgaggaaacaggaacctcagtcctatagcaatgaagaaatggattctttcaacagtctgaatgagctttgatgtaggttttttccccagtttctccagataagagcccagcccagctgacactataactggagctttgcaaaatactcagcagagaaacctgttgagcccacctggacttccaaacttatagaactgtgagataaaaatggtgttatttgaagccattaaagcttatggtaatttattatgcagtaataagaaatagataaacatcctttctttccttctttttccattaataaacatttatttctggcatagcatgtgcagggtacagcttcagacactataaaactcagggcatttaattctccaaacatctctaagaagtaagttttaatatccccattttcatgtaagggtgaacataggggtataaattttggacactgtctggactttaacccaaatcctattgcaacattttgttatttccattttcccctctttcctacaggattcaaattttcctctgcccaagtggtcaaggggggcagaaggccctaggagaaggggggcagtgaggcacgcattactcctgaggtcgttatggagatagtgcaaattggatgccagcaccatgggtcacagtggcacttggagactttaagaagtcattattattgtcaagcttgctccccgcatcttcccctcaaattctcagaattgaatttggcacagttagccagaaggcctggctctgctttggagtgcatgaaaagggattatgataacaatgataacaattaatatttaataactatttattctgttccaggcatcaattaatcttcaaatctaccctctgccttggccagggtgctgctgtgccaagccttattggtgcctgaggcagaaggaaaaatgtatactctggctataatggaagtaaacacatcaacaatattttcaaaatctacttcattgctagtttcattttcaaagaagagaattgtcatactgacaatttctcttcacccagtgacaattttgaatacattttcattaactgaagctaaattaaaatgatcataaatatatttgggtatatatactatacttaagctgagaataatgtttattttaatacttacatttcatttttcaatattttttcaactattttaatattctgcaaaaaaccactaggaaaacacataaaaatatgtatagaaatgtgtgcatgtacacacacacacatgttttgcctcaggctcaatatggctaaatagatcaacagtctttatttaaaattttgattattttcatcatggattttttttgcataaattttaatgtctaaaaatatattgtattaaattattatttaccgtgattactgagtttcttgacaactcctttaattttttggctgagtgacttacttatcctagttttggcccttgttcagagcaaacacccagcttctcccaaggggcttagcctctctagacttttctgtacattgaagaagatccaaatattgactgccttattttccaggcatgtattggtgaatttagacatttcaaagtctcaaagtgtctcatttttttgacaactttagcctgtcctaggttatgttacataaacatagggctttgcaaagctttcgtttggaaaaaaaacaaaacaaaaacttacaaaaactgtagctgcacaaatatagcaagaattgtaatgctaatctgagatgtattcaccctaatattgagaggcatctggaatactgctgggggccaatgtacatgcagagtaaaggaatcttctgggagagagagaagggaggtgtgcaattttctacaatgagtaagtgttaattgtttggccaacagtgtctttattgctctggtaataatagaaaaaagcagtaatacaaatatattctgggtcataaagatcactactcttagttttacttttatttcactatacttgcatttgtgttttaatgcaagaagcccagcaccctgccccaccaaaataatttaaaaaaaaagataagagatcttaccgaataaatgaggtgttcattctaagtgaaggtcagtggatatcttcaattcatttgtatgaataaagctttcatagcagttcaaacaggcaaacagcgtgaggggatggggacaggaattgaatcatggcacagtgcaccatagtatgggcttgtcaggcggcaaagatactgtaaaaatatagctatcagtgtcatgttcagatttcaaatggcaatttaatttcaggaacacaatacaagatgccacactgaattgatattgttagttcaaatggaatggttattattgttttgtttccattgaagttgtaaatgtgttttttgctatagtcatacatgaaccatgaagataaacagttaatatagagctttattttatatactttgaagttatattatgacaaataatttatataaacattggacatacaggtaattttttttcccttcaaaaaggccattatgccacccaagtttaaaagcctggaactctaagaagtgtcccagttatttagagaatatgtgggatgcagagagaaggtggtgcttaatcctgaggggctaatagcttgtcgtagtgtctcttagctatgatggaggagatatttgagagccttaagccttctttacactttttactcataactgcagtctttgcttcatgatgaagctaatctgagcaactctatagtctgttcacaaagtgttagagcaaagttagaaccactcttgcttcctcctcacatcaaacagcctaatgagattgttagcaacattgtgagaacctgttatctttacatctcagcaagaaggtgtgtatgtgcgggtgggcatgcccacgtgtggatgaggtgtggaattgtcactgctgttgcacttccaaattctgggaactgtgaatttggctgggcagggtctgggcttccagccagctgctaagctgtccaggtagatgacacactaattaggggaattgcaaaccaattagcactttggctggattggctgatgtgtcttagcaacttcttcactgaatgttttgtgataagaaccagtccaatgtgcctccctaaacccctcaccatctagatgggttatccagtctgtcctggaaaagggaatgctttagccctagggacattattaatgtttcaatcctaaactgtcagcctttcttcagaaggtagcaattctcccctgagagatgactatcatgctttggggctggtgggctaggccagacctgcactgtgaagaggagaggcaaaaaaagaaaaagaaaaaagaaaagaaaagaaaagaaaaaagaaagcttgcctagagggttggaaggtcagtagctccctgttgaacacattaatctgtatggtcattgtcagcttggatacagattccagaattggttttatttttctttcttcagaagcatccttgctctcagccttctgcagactgcaggcacctagcctacctgccctcttccctgatagctctgcctctcatcttcactggtgttggttccctacaccaaccctgccctgttgacctctgctggcctcgtagcagagaaggagagggaaggctggggaccaaggaggaggggaggcacttctacaggagtatgttctgattaattaattttttcttttgtattctaagatgctattaatgcacccaaaggaaattgtttacttctaaatggttacaacacatagaaaagtgtttctcatttttttataatataataacaactatactaatttcttagtatatgacagcttctgagtggccataacaattttttaaaaaggaacaagggattatgttctagtgtcctcatcactatcttcctttataggaaaatgtgactcttagagcagtaatcacctctgggtgcctgattcgaatagttccctatgtgtatatgatgtgtatgtatatgtgtacatgtgacacagaactttcagtctaacctctagcatgtgagggattccatcctttccccatacataaagaaaggtgattttaaaagacctttttgaaaatagactaatcatagagttcagaacaatgtttccttagttcacggtttgtgtgcatgattataccaatttggtctcccttattcaagaaggaacaggtaagcaaaaatggtgtgtataattcaaaagaccattctcaacacactttctattggcagcctcagttgttcacaccttagcatctctacatgtctaggcaagcccggagagcttagcatggttgggattgggactttgaattgggaatacaggagccacttgggatggaattttctctaaacgtggtttatttcatttaccagatcttatcaattaccagtgaatctacatattaccatactgagaaacattctgaggagtgttgcaaatcatctataaggaatgcagaatcctttcaccaaaattgtcattgaggcaggagtcaggggtggtgatgtttgcaatctctgccttaaggaccagagaaagtcaacatacacaaaattgattaatgggtgagacagcatgattggcttttatcctgcaccctttcctgtctccacacacataccctggcctcatggatgcagtacattttcctgactcttgactttggagtagtcacgtgaatctgttttagccaatggcatatgggtaggagtcatagtgggctgattcagagactagggcaagaggcctcctctgcttccacttgctctatgtttctaccgtcattgtgagctaaacatgccctgactagccccatggttacaggagattgaaagacagagcagagatcaactgaactagccattctgcagaattgggagactttggagatggtttgttacacaacagtggttaataatacagtccacaaatgaaaccttggttactaaataaatgtataattgtgaatacagaagagtgtcattttcgcaatggagcacgaagaaatttacatctgagtcccagggcaagcggactgcaagcaaacactgccaataaaaatggcaagaagtatttcattaataaattataatagagactcaaaacctgctactgccaggcaaagcaggtttttagcccatgttgtgtaatgtcatacttgtagaggtaggtataaggatgcattggttttggaatatgtctataaatttttgacactcctaccaccaagaggtggattttaatttccttcctcttgattatgttccagccttagaagttagaaattacttgcatctaacaaatattatacagagcaatggtattgtatggtttctgaggctaggttacaagagataatatagccttttctctctcttgtaggcacccacacccttggagcccaaaaccatgccatgcacatgtaaccaaccagctacatgtgaagatcacataaaggtgttcttgtcctggctctagctaaggttccagctctcagtcagcatcaattgtggaagatgggagtgcatgagcttttagatgatttcagtcccctgcctttgacaccaagtggaactgagatgatctttccaccgagccctagtcaaactgcagattcatgagcaaaataaacaccatcattactgaagcaacatggcatgtggggtgatatgttggggaagccatagataatcagagaaagctccttttctttgtgagcaatattatttgcataggagagagacaaagctgcatggactggaaacttccatgaccaaaaaagatgtcattttctaagggcttgagtgggaggtggccctgacagcatctgcatgagccagagatgcactcacactttcattattgcttgagggtgccaagaactgtagcagtaagagcagaagcagaaatgaagaacacgaaggatgctatggagtgagagaaaagtccatgcttgcaagaatccaaagacaccctgtgaggacgccccaaaatactcgaggaagtgtgtaagtagagctggacctttcattctcccagctggggtagaactggagccatgtgtgcagggcctgcttcttcttcagggctgccgtgtcctggaaagccaagcttgcacatgggttatagcactccactttcccaaagccctcatatacatcatctgtttcagtgctcgcattaacacctgtgaagtagatattattcccaggtctcacagcccataaatggaaactctgccgggaaataagtcctgcttttctctctgtaccagagctgccccagcaaattaaagcttattctaaatgtaggtacctagagcatttcttaaattaaacccagagtgaattctgaacctcagtctaagcctctactgatttgtctattctgtgagttcagagttctgcatagtaaaatctcattaattcaatctccatgaatgtagaatttggggtaggcatcagaaagcagtctctccttagtcacttagccacacttactttggcccaatgacccaaaaatttcttgttaaggcctttctttaaaatgatctctaaggcaggcactttataaatgaaaatcacgcccacctaagcctaggcttgcaggtttgtctgcctcgggctttcaggtatgtctggttctcttaccccatcaaagggacagactgctcacaggtgcttaagatcatcctggcatggacccttgttttatgcaaagtgtgtgccagtgctggatgtgaaaacaccagtcgattcccattcgctggtcttagccagtcagaaccttgcttctgaggcagggtgatactgtggttacttctctcagatttccctctaatgtttggaagttcctatacaccatactgtttttgcattagccacagatgtaggctgcaaatgtctactaggcagcatgggctaaccaaaataaggacacgattgacccaaccttgtcattcttagagacactggaaatctcctcaagttggtaataactagaattttttatcaaataatcactgttttacagataaagatggtgcctccacataaactgaacatatggccggcaaagagcacccctattccatcatccaagttctccttccttagctgaagtgaaaacatttgaaattgatgatacaaagtgctggggagggtggagagaaatggcccctgtctaagctatatggagagtgaatagcaaggcagtttgccaatatctatcacttgttaaatccacatacactttgctccaggaattagaatttcaggaatttatcttaaaactgttgtaacaacacatatatgaagaggtttattgtagccttgcttacagtgactaagtatcagaaacaacctagataactgtcagtgggaactggttgaataatttgttttatcaacatgtaggaaaatatccaatctctatagagaatgaggcaaacttttacaaactttgtaagatgtatttctaagtaaaaataaacataagaacaaacaaatgaaaataacaatgacatgatttagaagagtgtataaaataaaatacaaaagacacacacatacacaactcagcattacagtgaaaattttggaaagataaaatggaaaccattataatggttacagctagtattctggtaaaaaagaaacatattttcaagatactgttcagtaccatttgaagtttttatttatttcatttttaaaccatgtattacattttttaaattaaaagaaagcaaaagctaaaagcaatatgaacacagaaaagtcagtatgaggttgtcgatacgtaaagtttgaaagtgcagacttttcaaaatggcatcacaggaaaactaaggaatatatacattttggacatcaaattgcatcccagcacggagaatatttcttgaagaaagtggctgggtttgatttaaggacttgagggctggggtattttgccacaaaactctatttttttctttcccaaagtgcgtgtgaccctggggttaactacattcaatgttttatcaactcaccctttcatacactctgctatactattttgaaaccaaatttaggctactttgcatcagccagtgaaaagccaatttcaaattgacacatatgttgttgttatctgctggtcaacggttctgttttagcaggttgtcatctttgtttctgtttttgtgatcttgttgcttttatttttgagactattattttgattctgttgcccaaagcttctctagaaaaaaatttcacagggagggagcagctgccaagatccacaccttcttccctccacaccaactcactccatcatcttcaacaactgccaacctattcatcctgcttcagttggaagagctaaactttttgtttatttttggattcaagataaaattttattcaaaagatggaatcctgtaataaaacactcttggaaaataatctttaattgcagtttgcatataatattatttcaaattgaatatgatacagacaaattaaacggctaatgccagtgttaaaaaatgcaagtttcctaaatgtaatgtaattgagataaagacagtatttgttaggcttgcaaagaagagactatttaagtagaagtatgaggtagggctaagcacatggcttttggggccagaatgcctgggcttagaccttagtgctgctaattattggctatgcaaacttgggcaatcatttacacattctgtgctctgcatatatgacatagaaatgttcctggtgctagtgatatcacatagctttgttatgtaatttaatcaattacttgaaggacttagaccatgctcagtgcacagtaagcattatataaatattagctactgtcattacctttaatcaggtgctccttattaggcttaatactatgttcaaaggttaatatgcatgaaatattggaaacatattaatattatttggagttttataatctactttggctttgggggaaatgaatcactcatgatatgaaaatcaataattcaacttctacacatttaaattccatatatattttcaggacacactaaataacacattagaagcctttctgctcaagtatcttagtcattttctagacataatttacatacagtaaagtccacaaatcagttatacagatgcagacacctatgtaaccaccactcagaacacgagagaacatttccagcaaccaagaaggctcccacctgctccttctcaatcaatatccctaaaacagtgaaccctctgacctctaccctttaattagcttttcctgtccttaaggttcatataaatgagctcattcagtgagttctctttgtgtctggctccttttgcttggcaaatctgtgagtcccatcaatgttgtatgatagactacaatcatttgctctattctgttgatggacctttgagttgcttccagtttggggctatttgaattaaacatttttatagatcacgaggtcaggagttcaagaacagcctggccaacatagtgaaaccccgtctctactaaaaatacaaaaattagctggatgtggtgacacgtgcctgtagtcccagctattcaggaggctgaggcaggagaatcgcttaaacccaggaggtggaggttgcagtgagccaagaccacaccattgcactccagcctgggtgacagagtgagactctgtctcaaaaaaacaaaacaaaacaaaacaacatttttgagcatttttgtacgtgtcttctgatgaatacacaacttgcatctcttgaggagggagatttctgaatcataatgtaggcttttgtttagcacaacagcccaccagtttttctttgcatttcgtaaggcaagttgcaccattcttgtcccagattggaggccaacttttcttcagcaatgtggcagggtggcctgtactatgggtgtattagcctgttctcatgctgctaacaaagacatacctgagactgggtaatttataaaggaaagaggtttaattgactcacagctccacatggctggggattctcacaatcatggcggaaggcaaatgaggagcaaagtcatgtcttacatggcagcaggcaagaggccatgtgcaggggaactcccctttataaaaccattggatctcatgagacttattgactatcacaagaatggtgtgggaaagagccacccccatgattcaattacctcccactgggtccttcccatgacacatgggaattatgggagctacaatttaagatgagatttgggtggggacacagccaaaccatatcagtgggcaagttcaataagcaatgaatgcttaagtacccaccagagcactgaagccacagaggtaggaggaccaagaataggcatcttggctggtgacactcagacgtcaagatccaaatctacagtttctatagaggaaagcttccactggcagccaggcccctgccttcagggatgcctcaggccctgagagttcacctctttctcctggcaatgtcaagttccacatttctgagccaggcagaggaaattatttgtgaatttatgacagagaaaatattctttaaacagaatcttccctgattattggagcaaatttggctgctaggaactgcttctccctattagctcattgggaacagaggggagagcctctcactctgcttaaccccctatggctctgttccttgccagagaaggggcccaataaatgcttgacaagttaaatggaaatgatttttccccttttaaatgtctcctcactatggcatgtcatttatacaggacgaagcttttattacattcatcctctttcctcctacctaatcctcttgtctttcatcctccatccacctgtcctattgcatttgggactcaacatgtgacatggaataatagtggttaaagcattagtttaagggccaaaatgcccatgttcaaaccctgttctgccccataatagccactagatctttatcaaataactgtactatatcacaattttttgtgtaaataaataagttaatatatatagaagtgcttagaattatgctgggttaaggcctacataagtgttaccaaatattatgtgagaacctacaggggaaaaaaaagaagggaacctctgtttagccagagttcctcctctatagaggtcttctactctgaaaacatcacccttaattattcccaaaacagtctgcaatagtgaaggataccaaccagtaatccctcatgtctaattatacccttaaaacttgcaagcaccttatattcagaatatatttgaatgcttacagaaaccttttgaaaaagaagaagaggtagtatccctattttgcaggaactaaagttcttgggctttctatcatgcaaccatctaatcactcattcacccattcactgatatagagattgtgttaagcccctcccaatcccagtccccatcccccgcacactgtgtgctacacccagttctcctgcctggtcagccagagcccaggtcttctaatagccatcctgctctagtcctacccaccagaccccagccctctgtgagcttttattcgactactcacttctccatctctcttttctacctcttcctcatccagactttcatcacctgaacatcacattcactgcatttaagttgaatggcttcctaacttaataacttacataaaaattatgcattttattgtatactatgtgtttaatatttagcagaaagaataacagatagaaaaaatgaaagagtaaatgaaaatacagatatacaataaatgaaaaagagagtctatattttaccactctggataattgctatatctctagagcagatatgtatatgtgtatgtataaattttaacaaaattggtattggaatacacataacattttaaaacatacttgtaaactttaatatctatctttccatgtcaatacatatttatcaaccaaatcaattttaattgactggacaatgttgcacagtatagatatccattgcttaatttgacctgttattgaacagtaggttatttccttttatagaaatgttttgctagtataaacaatgctaagataaacatccttgtatatacttttatgttcatatccttaatgatgtactttaaataaattctaactggtgacactgcagtcttatttttaacacttttgatagcttttgtaacactgtccttcagaaagactatgctagtaaaagggtacccaccacatgccagcactagtaagtattatgtaaaacaaataaaaataaaaactaggccaggtgcggtggctcacgcctgtaattccagtactttgggaggccaaggcgagcggatcacgaggtcaagagatcgagatcatcctggccaaaatggtgaaaccccatctctactaaaaatacaaaaattagctgggcctggtggcgcacttgggaggctgaggcaggaaaatcgcttgaacccaggaggcggaggttgcggtgagctgagatcgcaccgttgcactccagcctggagacagggcaagactccatctcaaaataaataaataactaaatataaaataataaaaactttatcagttggatagaaaatgtataatctattttaatttgcattcattttgttaccaatcaaaatgaatatgttttcataatcttattattttgcaagtctttgcccatttctttatatttttatagttgatttataagatctctttttatattgaagataataaacacttatttttcacatatacggctgatactttctccatttgaaaaaaaattttgtgcagccatgcatggtggctcacgcctgtaatcccagcactttgggaagctgaggtgggagacttgcttgagcctaagaattccagaccagcctgggcaacatagcaaaaccctgtttctccaaaaaaaaaaaaaaaaaaaaaaaaaagctgtgcattggggcattgcagtgtgcatgtgtagtgccagcagctacctagggggctgaggtgggagaatcacctgaaccaaggaggtcaagactgcagtgagctgtgatcacagcactgcactccagccttggttacagagtgaaaccttgtctcaaaaaaaaattattttatgtttagttgctaattttaagagacttcaaatatttacgtgtcagttttagtcattatgttttccagcttttgtgaaagacttaataatgtcttttctagcccaagatgtttttatagtttcactttaaaatttaactttttaagatatacataatttatattcttttatagtgagacataaaaagctaacttcttctctgtttgcttagccagttctctctgatctgtggttaaaaatccactgccaggcagagtgtgatggctcatgcctgtaatcccagcactttgggaggatcgcttgagcccacaagttcaagaccagcctgggcaacatagcaagactctgtctctacaaaaataaaaataaaaactagctgggcataagtgtgtgtgtgcctgtagtcccaactactcaggaggctgaggtgagaggattgcttgagccccggagttcaaggctgcactgagcagtgatcatgccactgcactccagcatgggcgatagagaaagtcccggtctcaaaaatgaaaaaaaacaaacaaaaccctttcatataatatcactagttgtttgaatgctggtccatttagcctgtgacagcttggctcctcttatcttcctccttcctgtttctctcatcccttcatcttgggctccctcttcacgtagctttccacctctcctagaaacccttacatgttcaagcctttatgtcactgcatacccaagtccctctgccctgcagtgacttctctccactctcaccctaaccccttctaccaagaaaaccagacatcttttaaggtttacggaaggtgctacctctactctgtgccctttagttctccagatattaacttcctcctcagggttctcacaggaatccatatttctgttggagccttgttctggtgaacagtaattgacagtggactttgggcccttcactagcagttgccctaccatatttatctctataacctcagctctttcggcatacagtaggtggtagaataaagttccttcattgaacaaattaacaatcgactggcatctcaaaaaacctacctgactctataggtagactatagcagggatatttcttggttttcttcccagtatctcattactgggttatccaacagtatgctaaattccaataggggaattcatttttctgccataccctactgtgcatttgaggtgagactgactggcagcccagggtgtctgatgggcttaggacaacctgcctattccatcatggccacagtgatgacttctgaaccgagcatgtaacccaaccagcacctttggcctgagaggatgttttctgagtttgcaaggaaaggatggcttattcctttgtagaatgaaataagaagcccctacctacccaacatgcacacaggacacgagggaggaatgctataagcctcagcagttggtactcttcctcagacctacagaagagcttttcagaaatgttgcccacaataaacaagcagagccaagaaaaactaggcagaaacccagtcgttgttataacatttaagtactggatcatattgcacctgaagtgggtacccctgggctgtttagttacatgaaccactgcattccccttatcaattaagtccatttgagttaacgtttctcttaaatgtaactataacagtcataacatatataaggttattggatggctaaaattacaatgagacatgaaggaaacgtgggcatatcaaaacaaaggatagaggagagaagcaagaaatggtaaattaatgctgcaaatactaatggtgaccatcaccaaaccatgggaactaagatttctaaacagtcttccagataccagatcattgttagcaaagcaatttcctatgtattttattagtttctttgaagtatataaagtttcttgcccagctcttggcacagagtagtcctcaaaacccaataattttcataatcccactttcacccaatccccctcggtcgtaacaatcaacaattcatcttaggataataaaataaccacttgaaagcatgagttattgtctttgactttagagaattcatggagtttaagaaggtgtcagatggaaaaatatagaaagttgactcgttccccagatgaatgcaaaagtgaaacaccaagtgattgtttttagaggaatatgaatcatcacagccctgggagataaagcacagtgcaaaaggaaatgtatccagatcttgccaatattgatattcagccagtaccagacactggggagacagtgatggaaagtcagacattatacctggcctttttgggtacctcatattccagtggagaaaccaaacaataaaactaaatagagtaatttaacttttaataagctgtgtgcctagggctaatttgggaaggtagtcatggaaggcctctcagcatcgaaggcttggcagttgagttataaattatgagaaagggccagccaggcagaggtctggagaagaagaacccaggcacatgtccagcaaatatgaggacttcaactatgaaaggaaagaaagagaggcacaaagtaccataggcatccaaagagggcagacatagccgtttacaacttgcaagggcctggaatgtggttatggtcagaatcctgcaaaggatcaaagctctgggcccccaaggaggggttatgtctgaggctgactaatgtctttaaacctgggccagcagtgaccacagaggaggctgaggccactgacatcggcatgacccaggccggcagatgctgacattcctttactatgtgattcccacagagctggggcttttcatcacgaatgagcattattagtaaccagactcaggggagggagggggacatgtatgcagggagtgagaggcaaagggaaagtgggagaaaaacagggctggacacatcatggtgccagggacccaaggtcaaggggcgagaccctcaggctcgatggcatttggggtgtgggacacttctggctgcagggccctcagctgcctagtttaagactatgggttgtgtttaggggttaccacctcagtctgggaatgtcactgttcccctgagactaatatttctcaagaagctactgtttcagtcactgaagccaacagggtctctacatggggtgaccataggatgtgccacctaaactgggacttttcagggtaatagggagtgggataaattctaaacccaatagaacattgagacaactggcatgaactgggccaactgggatggacggtggccttgctcatacctccctgctcttgcggaggcagtcattgactgacttattaatgtgtgttgggtgttaagaattgcgcacgctcatcttctcctttaagaggtaagcaaatagtagccctgaagagtcaagaatactcaggggctcagtacgaaagcaacatagtattccagttagagtgcaggtgcagatttggatactccttgcctccaatctcactgccactgtttactctgagcaggttgtgttgcctctctgagcctcagtttgcccatgtgcaaaatgggaatgataataataatacttaccttgccaagtattataagcttgaattgaaataatgatgtaaggaggttagcatggtgcctggtgcataataagcagccacaaatggcagttaataggattaattctcagggatggagaaccctctaaaaggttgcatcaggactttgctaaacaggcctctaacagaacctcattctccatcctctgggtgctcctcccagggcctggtgtatgcgtctcctttagaaggaacacacacacattcttctgcccagggcatgtctttccctactttccagaggaaaatgtcctgattcattttccctgtcaggaggctggaaggaacaagcaaaaagaaggagagaattgaggtcattggtccatccacacataagctccaattcagtctttccagggaatcactctggatttactcaccaccaagtgacagatgagagcaacttagtaatttgaaaacctgggaaaataacatgtattctgagatgttcccagtgctggtttggaattactgagcactgttcatttcagccttcagcagatcatgccatcctgagttggagttggcagttctagggaggtcctgagattaacccagagactgagactggactccagggagtcacagcccagttcaggccttagccagggtccagactgtgcttgctgggttttcagcttttccaaaacctgtataaccaatccctgccttgttgtctatcttcgattcttagcaaggttcctgtttcaagatgcaaccacagagtagaatcaatgtaaaaagacatctatacagggagcactgtgaaacacacagagggctacaatctattattgccaggtgctggaagatcaggaagagctaagtagaagaggcatgacatgcaaatagggcctaggaggatgaggatgagtagagagtttaagtaagagtggaaaggaaggacattgaaaacacaggaacacgatgcacacaggtaggaagacaaggtggtgttggcagatagatcatatatacatgggtaatgcctgggagcaggcttaggaaaaagcactgcctcaatttgttctcttattaattagtctagtgtctttcttagtcacagactgtgatatccagggtccaagatgacctctaatgatctcctcctcctggttttcttgtctttgtgtggtccttactcccacttaatagggctgaccatgagccaatacgatgttgtcaaaattaaggtgtgacttccaagtctagatcatacgatatgtttccactttgctctctcttggctcctagctgtgggtaaagacagctaccctatcattaggacactcaagcaaccctacggagaagactatgtggtgaggaactgaggcctcctgccaataaccagtaccaacttgccaggcatgagacaccttgggagtggattttgcagatcaggcatgtcttatatgaaggcacacctggccaatagcccatttgttgcttcaacagccaaaaccacccagctaagctgctcctggattcctgactcctggaaactacatgccagtaaattacctttactttaaactctaaatcagaatagactatgttgtgcctttttttcttggagcttccacacaaagggatcttcatcatggactgttttgccacaataaacagaagatctcctggggcatattaaagggaaatgtgtccttagataacctggaagctagatgtttgtcaatgtggcttcatgtggttgctttcctctgcacacattctgcattctcctctatgcagctcacttcctttgtacggctgtaagtttccatttacctagaacttgcatttgcctatggtttgtggtggcaaccctggctctaaccttacatgacgttattgatccagagtcaatctcaatcttaccacatgttttgtgagcttactttatattttcaagaacgaggatgattggctcctcttgagtcaagtacctgcccatgaactcttcaggtaggaccaaggagcagtcacccagtatacacatggctccttagcttccttctttaggaatggactggaagaatcatgaccaaatgaagggttatagatctggccagcacttcaaacattgccatgtgtagtacatgtagccccaactaagaacttcccagaaaacctgctgcaagatcaagatcaaacactctctccatttttatgaacacactagggtgtgaaactttctctcccgaataagaagaaacttgaaacaaaatcctgttggtagccaggcattaggattcatgactcaagacccacatttttacaaaagcaattccaaactctcaaaatcaattatgcatcatattatatcctcagaataaaataaatatacatcccagaattaatatgaaggcataaacaactgctgacagcctataaattgtattaggaaaactttgataaactcttacttttccacacttccctcaacctcatgacaataactgtttagattcaacacatatcaggggcatatgcagctggaagtaaggagagttggaaataaataaaaaggaaaacagcaagagcaggagaaatgagcagaaggttaatgactttaaaggggaaaaggtcacaagaagaagtgaatctgatagccctggaaaacaccctttttcctttctgataaaggaaggtagctaggagtgtctttatgaatttacttttcatgctttccctctggtccttagcaaagagggggaaattcagaatgagctattatttactcaagaaatagttactggacatctgaaggtgtcagaggcgttcgaaccagagcaactccatcttgagtgagggctaggaaaatgaggctgggacctgctgagttgcatttccagaaaggtattcctagcctctagatatttacacttaagggaacagattgataatgtttactaaacagatccagacttgggactctccgaatatcccgatatcttgagaacaaaggcattcctaattttgctttaaagataataatattggccagacgtggtggctcatgtctgtaatcccagcactttgggaggctgaggtgggtgggtcacttgaggtcgggagttcgagaccagcctggccagcatggtgaaaccccatctgtactaaaaatacaaaaaaaaaaaaaaaaaaaaaattagccagtgatggtggcacatgcctgtagtcccagctatctgggaggatgaggcaggagaatcagttgaacccaggaggcagaggttgcagtgagctaagatcatgccattgcactccagcctgagcaacacaacaaaactccatctcaaaataataataataatattgattcttgcaaaatatagtaattaagaaaaccaatcctttgtcacaaaccctgtagcagagcacgtctcccagtgatcttctcttatcctgtatataaacaagcattgtacctagggtggacatattcctcctcttactttcaggaacgtcctagtctgtctatggagtagctgttctttcatcactttactttctcaataaatgtgctttctctttgcactgcggacttgccctgaattctttcttgagtgagattcaagaaccctttcttggggtctggatcgggacccctttcctgtaacagagggactaaatggagtcatgatctcaggcaacttaaaaaaaaatacaggagacagttgaacaaacaattgaagaaaaataggttcattgctatatcatgggcattgtacaaaattaattatgtgtccaggaaggtggggggattgagctcctcactctgttgaatgggttcatggaaagggcagtattatgggttgaattgtatctctcccccaaaagtcctaactaaccctcagtacctcataatgtgaccttacttggaaatagggtcattgcagatgtaattagttaggttaggataaggttattagggccctaattcaataggactggtatgtttatacaaagggggaaatttgaacacagagacatgcacacagggagaatggcatgtgaaaatgaaggcagaatcagggtgatgcttccacaagccaaataaccctaaagatcatcagcaaaccaccagaagctaggggagaggcacgaagagattcttcctcaaccttcagaaggaaccaaccatgctgactaacaccttcattttgcatgtccagcctctagaaatatgaaaggataaatttctgttgtgtaagccacccagtttgtgacacttagctatggcagccctagcaaaagaatacaaacattttatagtttctaaagattaagagaagactaacctgctaaagattaaccttcaggctgagggggccagaatagggcttcagtcacttgaggagggtagactttgggaatatgagaaaatgcctcatgttgtaggagtgcacgttagagagggatgcaaagtgtggctgtagagaaagagaaagggaatgaattgcgaaggcacgtgttgggatgttgcaacatttttaaaggaaagctggggaaaagagaggtattgaggcatcggaatcacgtgagggctgctctgtgataagtctacagtatacctggtaataacagatatccaaaagctatttgttgaatgaatcaagaagaattggctacttcagtgcaaataatcaagccatgggacatccagcatcaggctctaccacatagcctattgcatgagtgttccaggtgtttcgtagtcccctggtgaaagaagagccccaaaggcaagacactcattttccctgaaatgaaaaggtcagccctagcaaaggggaggaagtgttccttgtacctctgtcttccccatgcttccctgcctttccacctaactcgctcatcgaatgtcgtttaggaaccatgggttgccaaatttctctttaacctgaattatatgtttggagacagaaagtgtaagatggactgagaagccaggagtagtaaccagtaggtggagagatagtgaccagcccctggaccccttcagaggacttgccccacctctgaactgctctttctgaaacatcttgctttctgcacaaatcatgttgtgggtcgtggtgggagccagaggggggcagccttgcagcaaaatgcctggaggctgcattaacttctttccctgacaacttatatggcagctaatttatatgctacctcctattagtttgggggaaaaatatagctaacgataacgaagagaatgccatctatttctttagcttaaacatgcctgcttcagtggtgaacagttgatctctaagcttgctgttttcaggctataaaagctgtttatttcactctataaaagaacatttgaacttatatagctatttaagtttaaatgttttaggggaaagaaaaatgcaaggggaattagcaaagagaggctgaaacctgatctgggctgcggggtttgcatagaaacttccctctttgggaatcccccctgcctgcccccagtacacccactgcagcaccagcccacaggaaatgtactgagctgagtgtgatttcaacattagtagtcatttcggcaaagctctcagagtcaatcatttctcatgcgctggtgtgatttgcattcactggggaccccttggctcttaaaaagctgcagctgccccaaagaggtgaaggacattaacaaatctttgttgtttttctcttaaaaactgtgagtttgcatgagggatctgggtagaaatgtgcttctctgtgcatcatgggaggctgctgctctgttggctctgagaatgacagataagtcttgagtttttgacaaataagctgctttctcttgaggagtgctcagacttccagttagccaccagaatgctggcctttatgtctttctggaagagttaaacattctccaaacaggctgaccatgcatcttagtttgcccaatacaatcccagttcatgcctgttgtgttcttggtgtatgttcaatggtgcttccttcacccttcagaatgtcctgcttcagatcataccttatatgacaaatctattcctggaagtcttttcttgcattttaggccacatttgcacccaatttggggagatacaagtgctttgggatacagatgagtttgagaggtgagttctcttggtttgggttcccataagatcagctctgagtcaattgtgtgcaagtagcgtatttgggaggtgcagaaaacacctgttggcaaacagggatataagaataaaaggacagcaactaaaataggtgccctggacatctggaacttaattctgctgaggacactctggcagacaaagaatgccatagaatcatttctcatggtgggtgaagataatcccaggggtgttatttccattacttcctgtctgcctgctagagggcaaagcagccttcagctgctttggagaaaagctacaactataggaaagaaggatgaaatggagaaagaaaacacaagtgttatcgagtatccaaatgtttcccaatctttctaggcttagcttaattgatacatatgctccttcagcagggtcatcttcataatgaaattattttaagtgcaattgtttaatgtatgtctcacctgccaaactatgatcttcatgagggcaggactgcataggttttcttcaatatgttctttgaacatagtatgataatatttgtcaaatgcatcaataaataaataaattgtgtcagttgtgtcatatactccatcactcaatgttttccattctatgacgtaacgattataatctccaatttgtaggcaagaaaacaagaagacttctcaatattatgttgttaggaaatacaaatctaggtctgtcttactaattccaccctcttccagtatagtcttctggtaaagaggagtattgataaataaagatgttcccacttttttttttttttttttgagacagggtcttgctctctcacctgggctagagtgcagtggagcaattatagctcactgaagccttgaactcctgggctcatgcagtcatcttgccttggtctcccaagcagctgggacgtgtagcatgccacagtgcctggctaatttaaaaaatgtttttgtagagatagggtcttgctatgttgcccaggctggccttgaactcctggcctcaagcaatcctcccacctcagcctcccaaagcacttggattacaggcatgagccactgcgcccagccaagaacttcccattcttgcaggcctctttgcatctcagcatgttgtgttctacaaccacacatgctgcctaatcctagtctgccacttcatatactcttggcccttctccaatttaccctcctattttagggtgtcagactcaagcctgctgtaattgtttaaagacttaacatggaaaaggataatgttttgtttgttttaatcttcaggcaagggagaaaaagccaaagtttcagaagctagtgcttgcctttcccacgaatgattctgctcctgaaaaaaaaggaaaggcacttaaggatttctgacatcatttttttcccttcttcattgtcaaaagtctggtcaaggtttgatggggggcggggtgaagtgaggtgggagagtcgagcgctgtgctggtaaatgttcaaaaaccagctcccctggaacaaactttcatttgtagcatatgccactttccatggtgtgaacttaaaattgaccactgtggccaattttaagctatcaatgttgaatcactgaatgtgaatgttgagaatggacccacagtactacaacattatatagcatttccatcacatggatataatagatgtaaacaacctcacaagcatggattgcagtacaataattgaaaatagtgaattttgagtatttacttattaccttttaaaatgcagtttattagcttaaagtttattaatgtaatttttattaacagctgcatctaacaactagaacacaaaatttctgtaagtttaatcgtcagctcacatgggctgctacagctacaccattttagagactctctcttgagtaagtcctttagtttgtagattctattcagatctttgtcctaacttcaaatgagtgagatctccaggtgaaattggccaatggaaagtggttcaagattatggctggacaactggagagtgaaccatcttttgatgctctcaaagtttgagacactttgtgtgtgagatattaggcttgccactaccctcctccctaatgaattattggccttttgtgaccctgtgtctctggaggctgactcctaaggagtgcactgctcaaggtcctttgaccttttgcttcttgctaagctcagaaaaaaaaaaaaaaaaaaaaagaggcactggcaagatacatgaaataagaaggagagagaattgggagtatatatacccctactctctccctgcctcactgcagttctgacattagctaaaaaggctcctcttaggtgggcatgttccatggctctcactagaccagtcccagttccctccccttggctttctctatagctgcttcctgggtgccccaccaactttcagtccacacctctgtaaacagtccctttattaaattctttccagctaaacagttttgagtgtgccttgtttgatagaagcaccctatatgatataccaagtgcatatatccagagtaatatatccaactgcattggtctttaggaaacctaataacctaattgctcatatggggagcacatttctacgttatattctattatgctcaccctgtcacgtccatactattatcaatgtccagttatcaatgatcagtgggaaaaggggacacagacaattagctttccaaatatagggctttcttaactcccacatgcaacttcatccacccagtgagcacaccatcaactcaccttgactggttggctgaaagtggctcatgctttgctttgagaaccaggatttggctctaatattaggcacagcctgtcctgtgggacttgtaatgaaaccaggcagctgctagggctctctcttatagtccctatcttgttcatctggcacaacagctatttctgaattctgcattttgtattcttcttatggacacctttctctggcctgacattcttcttggtctattgtcccagacccacgcacgaattcagttgtcaaaacatctaggagccaatgctaggtcattaaactaacataaattgagaccatgcaccagttacacactcaactcatattagcacagtgctaagaagttcacacatacagcctcttctaccatggtaaaaacccaacgagatgggtaccatttatcccacttctccaacctattacctactgcttgtgctggtcatttgtctgcactcggatatattccttacccttctttccatcttctctgtattataggaaactacatttacaggctcccttgaccactagtttctggctagatatggcctactgaaggacttggcaagacacaggacaggaaaaggccagggtaattttcttcctctcccacctggggcagcatctctggaagcaactgtgcttctcttgcagctcccactctcactggacagcgtatgccttgatggcctagcaggcctaccacagtcccagtttccacagggctcttgggatcctgcaaaactgctttcttcttttgtccctccagccctagataaggcactcactttctacagttgctaatttcttgcttcatctcctcttcactgttttagttcttcttataccttaaaactaattccctacattaaattttctctattgaagtactttgcacgtgttttgctttcctggctgcacttgactggtgagtttctctatcccttgtcttctataatcatatttctatagctctgtgtgtatgtgggtgtgtgtttaatttattgaaagcatcctgtactataactatttgttccctttatagtattaactagaaatttctatctataactacttacattaataacagtttatgcccttttacctgtttattgtctgccttccctgatagcctgtaagctctatgaagtcaagcatttcacatattttattcattgatgtatttgcaacactcaatagatgactgacttgtgggtaatcatattaaataaatgagtgaaaacattaatgaatccccattttacatataaacacactcaagcctaaagaggtgaaataatgtttagatcatctgattttgtgctgccaggtagctcagtgaactgcctcctttatgccacctgctttttttctatggatttagaattgtggcccagatttcctatggtagcagccatcttatttcaccttggatctcccaatcccattgtccctgtttctccagcaccactgtgtacctgctctaaacatagcctgctgttgtgtcatccctgtcatactaggctgtttatgcttccttccatggcaccatgagccatattttccaatatttctcccagtcctggggtggtccacatttcattccagcctggatccctgactttcataagagtacttatgaaactgcatgccaacatttcctaacaacgtataacatctggtggaactgaggaactcaggcccacacctaaaatagggggtttccccaaataacctagcctgagctgagtctggcctgagctccctgctagtgttgccagagaaaatataaaatacccaattgaatttgaatttcagaaaacaatatatatatatatatatactggtactgaaaaagtatttgttgttcatctgaaattcaaatccaactggacaccctgtatttttgattgctacatctggcaaccctactgtctacagttgtcaaatagtgggagagctgaaacattaactaagactatgttcctttccaagagaacttttgaaaattatcagaatctcccaaagagatgtaaaaaaacagatccccaagtccaatcccagacctgtttgttggataagacctcggatctgcttctttaaaagcgtctcttgcattctgtgagtcaagcaggctttatgacaactctgattgttgccataacagaagcaatgagagaaatcagtggatgcagatataagtgaaaacaaaacagaacaagagttttaggtgacaccagaaatcaggctatctgattctcaaatattgtgctcctctgaagcagaagggagggactgcctgtgcccagaactgttgaccgatcgtgtcctggagactacttcctgtccttgttctccatccttgcctcctcagcactctggatggcggaggtcccgacagtaaccaggcaactctagagtctggcctgagctgcctgctagggttgccagagaaaatataaaatacccgaatcaatttgaatttcagataaacaatatctatgtatatgctggtactgaaaaagtatttgttgtttatctgaaattcaaatccaactggacaccctgtattttttattgctatatctggcaaacctatctacagttgtcaaatactgggaaggctgaagcgttaactaaaactatgttcctttccaagaggacttttttcttttgtaaaataattttcaaattttattttagattcaggggatacatgtgcaggtttgttgtgtgggtatattgtgtgatgctgaggtttgaggtacgaatcatcccattacccagatagtgagcacagtatgcaataggcaggtttttagcccttgtcctcctccctctcttcttctctagtggaccccagtgcctattgtttctatttttatgtccatatgtgcccaatacttagctcccacttagaagtgagaatgtccgctgcttgtttttcttttcctgtgttaattcgattggaatgttggtctccagctgcatgtgctgctgtaaaaggcatgattttattcttttttatggctgcatagtattccatggcatatatatataatatacatataatatatatataatatatatacctataatatatataatatataatatatatatacctataatatatataatatatatattataggtatatatatatatatatatatatatatatggcattttctttatccatcaaggtacccttgatgggcacgtagggcacgtaggttaattccatgtctttgctattgtgaatagtgttgctatgaacatgggagtgtatttgtgttttgttttttttttttttttttttgtagaactatttattttcctttggttgtatacccagtcataggattgctgggttgaatggtagttctgttttaagttctctgagaaatctccaaattgctttctacagtggctgaacttttctatttctaccaatagtgtataagcattcactttttctgtagccttaccagcaactgttattgttttactttttagcaatagccattctgactgctgtgaaatcatatctcgttttggttttgatttgcatttctctgatgattagtgatgtaaagcattttttatgtttattggccatttttatgtcttcttttgataaatatctgtttatgttctttgcccatttttacattttgttgttgttgtttgttttttgagttgttttaagttacttatagattctggatattagacctttgtcagatgtgtagtttctgaacatattctcccattctatgggttgtttgtttactctgttgatagtttcttttgctgtgcagaagatttttagtttaattaggtcccattggtcaatttttatttttgttgcactttcttttggggacttagtcataaactctttgataacgctgatgtaagaggacattttgaacttctgtttcttcgagtcgcataaagccagtgatgttgaggaagtccctctttaataaacattgtcttctacaagacttattctttgacagattcaattctgcacacatgtagtatttagtacctatttctgtctgccgtatgggttccaagtctatccccaacatgatagtggcaaatgctcagtgttctaggatgactttggcaagaagttccatctaattagaagaccagcatcaatatagctaaaccagctcaattgttttaggtatataatttgtcttccaattttgattactgcaaatatgtttaccaaatttgtttaagggcatatcctgccttattttgcatttctcatagatacatgttaaacatggaatttaatacataaaaatggtaggatatgccctttccatgagtgatgggattgtttagtattcttggggaagtctctgtgtttgtcctttatttattcatttaatatatcttttttgagagtatattatgtgctacgtggtgttctaggtgttgggaataatgaagtgaaacaaaacaaaacacagccttaaggagtttgtgctatggataaaatgagaaagaagcgggcaggatgggcctctggggaggtaatgtggctgcaattttaaaatattcgttaagaaagacctcactgaagaggtgacatttaagcagcaatttgaaggagaactgcttttaggattttaagaactctttagtgaatttgtttaatcgtcgctcattttaaagtgtatacatttacctaaaatggagtactcatagcaagtctatcatttatcaggacatcaaatttgtaaggtgatattggaatgcaatgtgcttaatgtaaatatccactcttcaatctcaaatggaccaactcagaaaaacacagtgcattacagttgtttctaattaatatttgttcatgcagtatagtgcttaaagtgtaggttctgcagtgcaactgcttggtttcaaattctgtccccaccacttagtaataatattgtgtatgacagattgttataaatttctgtacctcagtttcctaatgttacattgggataactgtattagttacctcagagtgttattgtgaagattgaaccagacaatgtacaattcctatcccagagaaagttcttcatggtatgctaataagctggctctccagaagaaaaacaaaaagccctgatatagagtttgccaatgttcatggcataaaagtctcaccttagtcaatttcaagctcagtacattgtcactgaacatagagttgggaagacatgcacacagtcagctacaatgagctataacactgtactgactatataacacactaaatacatgattcatggtgccatattatcaaagataagtatttatttgtaggaaaataatggtcttaagaatgtatctttatgtacatatattgatggctttagagcagactttctcaaccttggcactgttgacaatttgggtttgatttttttttaaattgagaagctgtcttgtgcattatagaatgtttaacagattccctgacttctattcattagatgccaggaactaccctcctgccctagttgtgacaaccaaacatgtctccagacattgccagatgtcacctgagggcagggaggaattccctggttgagaaccactgctttatagaaatggtagccagaaaagctagaaaaacatgtttctagaggaatagatttaaaatcacattttaaaagaaagtaacaacaatacaagtgattacaaatacactgaaaagcgtatcagtttttcagtaattgatatttttaagaagatgagcaatgggttaacactaggtggaaaggtgggctaagatgtcacaggtggcaagcatcatggcagagtggctggagcctgttggtgtcagataggcctcggctcttacctggactctgctccttatttgctgtgtgattctgggcaagtcacttaaccactcagagcctcaggatcctcattaatggaaaaagaatgaagactgactgaaacagattgcaaacataataatcaagtcttataagtatttattgaagaggaaagaaaagggtccttgttagctctgtgttttgggggactggtaggccttgggcaaggactgatggcaggggaagcccaaaaggtgtggtggactggaaagcacaaaatgataaagtgcctgccccgtcacacacggctgcgggtcactgcttggaaatgtgagaacaaaatgggaccccaagctaatgactttcaggtgtgctggcccggctgcctggtcattggggaatgacatagaggccaaggctaatgctccggggctgccaaggcaaacatccagacccagggcaaatcaaccagagccagggacttggggcctctcatcgcactgcacagcaccctgtggctgcctgggcctgcacctgcccactgcagacacagcaggcactgcacccttgcctctctcactgcaggcctgccgtccttgctcccagatgtccccattgccctgctacctgcccaacccagcactggcactactgttctctctttttcaatcccaaccttgtgaaactccagtgaaaattctgctgattggaacgatgcctgagtcagtgcactttagctatgtggacagagaattccttctttcttcctgcctaccctttgtttgctctattctttgaactttgcacagtgctccactccaggcatcactagtgtttcttggtgtccccttcttccttccatcacccagctacggagatggacccaacctatgatgcatttcatacaagctcttttctgctcacacaacactctctgatgagccatgggacagactgaatgtcacatttgtagcatcagttactccaaaggacatgatggaaggtagccaggtgggtaagcatgcaagtggacagcatcagctgggttcagggatgcttactgataccacacaaattctaccttgcaggcccctgaccctaggcttgcagaaggattcgctctgacttcacaaacaagactgttgtgaaagtatttttgttctgggacttaccgtcatgggtcagaatctagatgctgctgcttatttaatagctatgcaaacattattaaactctctatgtctcagttttccaaactgtcaaactcttttttatgactgttgggaagataactgagactattctttcacttaacaagtatttactaagcattgatgatggtctggaagcagtgctagaccctggaccttagggatacagatatgaatacagcatagtctctggtctccaggagccacagtctaggagtaaaggcagatgaaaaactatagcaagatgaaacattatgtgtgtgtatagtacacataactgataagagtcaagtcttcctggaatacaccattcataatccttcagggccttggcacttattgttgcctctgccctcaaacttgcctcccagatatctgccaagtttgctccctaactttcttcaggtctttgctcaaatggcattttgtcataggcatcttccctttccaccttatgtaaaataacatccactctcttggggtctattcccatatctgttttcttcctagccatatcatcacctgatatactgtctttctttttccttcccttccctgctctagaatgtgaactccatgtgggcaggagcgttgttttattcactgctgtaactcaagcaactgcaactatgtttgtaatgtaattaaatgttacaataaatatttgctgactgactgaacaaataaacagaaaaatgagtgaaaattggaatgacagaataaaagacataattcttactgggagagtctcaaagaaaaaaacccttgagagggacctgcagatgtcagagttacttgaataatacagggaacagatgagggaagagaatgtgcaaaggacatttagaaagtcatggtctgttctagaagcagctgttatttgttagtaactagagagatgaagataggctcagaggcatggcaggaaatgcatgtggagagtgagatggcaacaaatctcatttaatcccttctaagaagagtgtacttggcatgcaacctagaacttaattttatttttaaaaactaacacagcaacaggcacatagaagatgcccaatgcttttcgagcgtatgctttccatatatcagtctgtgagaagtgcatagaaatctctaaggtggactattctactgaccccagctagcctcctatcccctgaacacagataagggctttatggcaggtaagacctggggtaattggtgtttggagggcaccacaccacaggctgtgtaggtcagcattagtatacaacttatggaaatgtttgccccttctcagaatccaggcaaggccagcctaccccagtccaaccattcatcccaattttaaactctccatttcaaaagtgctgttccataaagtgttgataaattagggcttaattatcccagctccagttccactatgctctggttacagtaaataaaccagtgcctgtttaagtagatttttataatggggcaaactcttgtgtagactttttactgaaacagaatcactgctttgaagagagcccaagtttcatagaagaggcttgtggcaacttctccctggctctgcagatgtgcttggagaaaaaaggaagctgaatactcaggctggactaaaatgagggaggccacaaaggaactctgtgaagtcagcagtattgattcttactctagtttctcacacatgtctaaagttttaaagagatcatagtctaagaggaattgaagagccatattgtttttgaaatgcatttttaaattttttaatgatagttgagaagtaaatgaatgcaattgctgtggtgtggaagcatggtgtgaggtaggggtgtgtgtgtgtgtgtgtgtgtaaattgaataattataaactttggtgaatgaccttttaggttatctcaattgtaggtggcattacaatttactcataattttaaggcctcattacatctcacccagagcaatggcctcttaattaatttttttgcctccaagttcacccaggtacaatgcactcttcatatcaccatcagccaaatatttccaatatacaaattgaataatgtcacactcttgtgcaaaacccctttaatataagccactgtcctacagaataatgtccaaactccttgacctggaatttagaggtcccttccaagtagtatctggctatcttgccatttgctatgtttcaaatgatggaaatcaccagggccctgctatattactgtcttcctgcttgtcaataaaaaattactaagcaccatcagtaaatatttctttattgaaaaaataaagataatttgaaggaggtacacaaatacaaacatctatttatgttctctcccttttatccctttcttttttatggctccaacatttttacaaatacataacttctatgatgggacccatgtgctcataaattaagattagaatgagaagcattgaaagggtgaataagccaagtctaccttttatttaaggggcaagcatttgcagagacattggtcaatgcattgtaaagaaatgactatgtcctccttagaaaattctgaaatggctaatcaagagacccaggctggatgagtgatgggaccttgcctcactcagctgaggagaaaggaaggactcctggtgctctcatccccacagatctcccctggcaccatcatgaccctggttacaccaacctccatgtgccacctccatcagaaaaaaggttttagtagcagcctactcttgacaatgactgatgaccagcatgctttgggttccattgaaaagccagcttatgtgacaggcatcactgtacttactgcaaaggaaaattatgccatttcagagaaccaggaggaacacagcgattgtacattgtccagtgattttcctatctaagaggcaaaataaattttctatctggaataaatattttggaaaatagctggtccgtgttttaattggcctggatcctagtagtctgagatgcactgaggccatttgattcactaaaatgttgaaataattgagattcctcaataattttgaggggtaataaaagcaagagataccttcaaatcaaccctagatgagagctgagacctgttcccctcttgttccaatctaagggctggacatacctcaaaatctgaggatgggaggattacctacaatgggttgagattctgggaagaggactagaattctatgtaatcactgggctgggccattcatttgggagccagaaacaagaaaatccagctgtgggagtgtagataaaatcaggatttggattcaggtcttcttcatttcacatcagcatgtatgtacgttgtaccctggtcccttccttaattccacgttgctagtgtttactgcatgtggccatatcaaaaggactcattcatgttctgtgtctggcacaccatacccaatcatgactctggaggttgtgtctctctgcctttggttgattttaatatgacatgaggtcctggaagtccctcttattcattttatttatttattttaatggcctaaattcaactccactaagcaaatcaattcagcactgaggctgaaatttacaatacggccaccaatactatggctcaacaggatgcattaagaggctagttaaacaccaaatgcagtataaatctcagccttataggtgtgctgaaaacataaatagcttccaaagagccatgatcaataccaagatatatgtgcaggctccaagtgtgcaaataatttaaattttaaattagcccctccttagtattcccaaatatcctagactttgcaatttctgttaatgatgccaaatttccagtatctaatcattggtttttgagtttctattaaaatatccaaactgggactggggtggcatcatgcactgtgtgtttattggaatccagagatgggaaatgagaaagacataaagaagcgagttacagagaataagacaaagggtgggcatccaggaaggtacaaataggtggcacaggagaaagggcaggtagcaagttggtattaagaaagtctggaagcaggtagaaggtgccaggtcatatgaaaaatgtgttttggcaataccttaatggtgctgggttggccttgttatggaaaaccatggattctgagcaaggaaacaaagtgagaatctcaccatgtgaacaccagacatagctgcaagaaagaaacggcatcagaaatgatgcagacccaataccactgccaagtcataaagaaatcgtttgcctgatgctggtgttggctttgaggctgaggctggctgagcctgcaggagtgagccatgggtactcagaaggctgcaggcatggggttaagtggggaagcgacattctctcctctttagtccctacacctctgccttctctggaagcattatcctaattttccccaaatcattcactctgggcagaggccagattgcaaatacctgggcatgaaactatcctttacctgggtaatttcaggggtaggagatcttaatttactttcattttcttctagatcacctcacctagtgggccagagagttgggcgacctggtttccaatccccactctgctgctcactagcagtgctaccctgggcaagttactcgacctccaaaaacttccatttcctcattcataaaataggagtaacaattaaacctacatcattgagttaatggaaggattaaattaccgaaaggcatttatcctggcccataacaatttctacactcactcttatattcagcaaatatttattgggcacaccataggaaacagacacatttttaacactgagaatacagtagagaagagtaacaagtccctgctttcataaaacttttattctagttgaggaagaaaataataagcaaagacaaaagatgtgatatgtcaggtgataaaggttatgaggaaaaaataaaataggctaaagcaatagagagtaatgggagtgctctttcagctaaagcagctaaagcctttatggaggaggagatgtttgagcagagatgtgagtaagtgtgggagtaagctatgcacacttgtgcaggaagaggcttccaggcagaggaaacagatgtgcaaaggtcctgaggcagatatgtgctttcagtatgcaaagatgaagcagcaagaagactggaggggctgaaacataggcagagaggagggagtggtacctgctgagcgagagcaggtgtcctaggcagccatgataaggactttggatgttattctgaaggagatggatgagaaatcatccgaggagtctgaaaagagcagctccacgacctgacttacagtttgtaggagtagccctggccactgtgtaggtaaaaatggggcctctaaggagctcaccgtagttatccaggggaaagatgatgaggatagtaacaaccctgcctcatatgaatgtcactgggacaagttaaggtcacaggagatggtgtcgtcctatgtccatcataggaactctcttattatttctctgtctctccttttgcccctgtacatatgcaggattcctgccccagccttcccagtccttgtataagaagcactctgctgctgtccacctgcagagccagtgctctgacatcagggaatcagttcagccttaggaactggtccctgtgtgctggtgctaattactggagatgtggattccaaaatgcagtgtatcctgaaagtcttgggcccaaatgcaaaagcttctccttatctatggagcacctttctgcccattctccttattgcccctggcctattcacttggtggtcagactgaccttacttgtggcctgaaattccagagagaaggcagcagggagaggctatttttgatgtttattaattctcaaaatgctgggttttgagaccccactacccctacctcaaaggtgatgccacggacaaatcaaattaacaaacaaaggaaaaggtagagacgggtgtgttctaaagacaatattctctgagaagatgataggcaggctctagactcatcctttaggctgcctccctgacctctctggtacccatacttttggtcataagctgtctccatcttcacaggtttgctgcaacagaaaggggctcatgtcaacttcctcaacacctcctgagactgttaaacagctggcaggaatatgagaacaggtccattctcatgaggttcactagatttacttgtttgttgctctaagaagccatcactcaaatttctgcaatgcaactagttaacgtgtccttccatacagctttctgaatatcccccagcctttctccctctgctcccaatgccctggtgaagatgtggccttattatctctggaataggttaaggtaccagcctcctgaatgttccacctgccatcactcttgccccctttccaatccaaacctgagcaagtgctcttcccacttctccccactttttttttttttaattttccaagggccttggaagaaagtgcagctgtgtgacttgtcttgcatgtcaccactctactgtgagacattctgcagtcccactagaatcttcagctccctggagaacgctgcccccatgtacacttccatacctttacacatgccctctctcctgtcatttttatgacctagcatccaattcaaaagtcattctttccataaagttttatatcagtatcccagaaagtgagattgctcactcctccaggtaccccattcatttttttaccttcatttcagatatcccaaattattttctaattatctctgtgtgtggcattctccttcactggtgcatcaattctttgagggcagtgactctttcatgctgccatgcactaagcatttggtattgttgatttcatcctaagtagatctagaaagatctgaggagaagagggtataacgacacagtgagtcacacctgcagtagggaaagaaaatcccaaagcacatgataataatgtttgcaagtttttccttaatctttcatgtatgtaaagtgtgtcgcagatatggactcacttgcccttcacataagtcccatggggaaggcatttttattcctgttttgcagatgccaaactgagtcttacgtagaggggctaactgaattgcccagtgtctcacaagtcaagtgtggtgtgggagccagaattcaaagttcactccatcccacttcaacacatgagttcttagtcactatagaaatgtgccctctcgcactgggagatgttgacctgttggcctatgtatgatgagctctgaggttgggcttgcaatgacttgaggaattatgtcgaagcgactgcagcagaggctacaaagtgtctgcctctgatagggtttgcagacttgcttctctgggttgtcaaccatttaaagcacaaaatgaggaagacttacatggcttggcccagtactttgtctataatcccaaattatacttagcaacctcaccatccaagccagagtcctttctttagagttttcaggcacaaaaggaatcatgattaatcagtaatcattatcaacgcttaattttgccctggtcctgatttgggggcaattatttgtggttgaaagtagtaagcagaggcaaagtgagcaaagataaagtcaccaaggttctttgagcagtttatggacttctttttctcaggaagcccttcaagaaaagcattctatagtccactcagaacttcttttgaccctcacgtatgtattcaaaaaacactcattgataccaaatcctgttatagacactatagctatggtgacaagcaagataaattatgaaatgcttattatacagggagagacaaaaatataacccagtaaaaattatgaaatataaaataattttgcattgcaatacgtattatcaaaaatatttaataggaggtagggagagaaaataatgaggattgcttgactttctatagtgcattcaagggagtcttcttggaggaagggtcatttaaatggaagcctgaagatagaacagaagtcgggtatttgaggattgcgggaaagagggctcaagatatggggagccagaaacagggatggaggctgcggaattaaggagcttgtgtacgtctggagtgcacaagatgaggatggtagtaacactgtctccaaaatttaattttgaatactatggttatgcatcctgagtgatccaggaaaattgccttctttctcttctcctcaatctctaagtacctaaactaagcctcctcctcttgcaacgttttatctctggtgttcatgggagttgagaacacaccattggagaatttcctcagttcaaagacaccagatcaacaaaacaatctggatgttaaccctgaagccagcctacaataatcagggcttctggctcaggttcacaatgagcaggagacctctgccacctccagtgctacctctttgtaaaacctcaacaagctattttatgtgaaaatattaatcactgctcattgcagcgttcaaaatcagtcaaggaagcctctttgaaggtggtgacgtaggggtttatataagggatcagctgatggaaaggagaaagatgcgcgttccagagagaagaaacaagctgggtagttttgcaaatggtttatgcccatgtggagacacgccaggttagagcaggtctgtgtgggagagaagttgtggttaggggcatggaattggacagagaccaaaaacatgggtcctagaaagtcaaattggaggactttcatcctgcaactccaccctttcctctctttttttcttcgaaattaaccggacttatttcttattctcctcatgggagatttcacagctattatttccattttctcaatagctttgggaggtataattatccccatttactagctaaggaaactaaggcttaggagggttcactgacaggagcgggagcagcttgggctcatgtcacgtgtcttcatagtcagcacatagcttcatctgtcctatcctgcacctgctgtgtcttactgcatttagattgcagccagctttctctctgtctctttgaatttcagcacaggtaggtactgcacttacccattcttatagatggcaaaccgaggctcagagatgttaaaccactcctccaatgtcacattgctaggaagtcgccaacacattactaaacctggggacatctgctcttcagggcagcactccgttgcctcccaatacccagtagctgtgattgttagatgatgatgatgattattaatagagttattgcttttggggcaacactagcagtgcagcagcgagcaggctagcagggcccagggcagcttgctcggccacatctgccctggagctgctgtctgctgtgcaccaggaacccgccgaagcctgagagctgtcagcacagattccaccagggagccagcaacgcccctcacttcctcaggcctctctgaaatccagccaaggaacaggcgctgagctcacagtcagatagctcccggagcctccggccctgggcacggtgccctagctggtggagatggaaacagcaaggcccttctgactcaaagactcctcattgcccctgacacctcagacttaaaacccaccatcactgtcattcagcatccaccctgccaggcatgatgcagggagagaggaggggataaaaaagggaagggccgtacagagccagggcagagggaggaaccgagctggagaaagcattaaggacccacttgtgaaaatcctttggagtgctgaggctaaaagcccatctgggtgggatcaaaggggagcccccaacacagcccatgactggaggatcagcaacttgcaggcctagttaggccttgatttccctttttctcagcttttgaggagaactacagtcactgcctgagaaaatgcagcctcaggacacaggattctaattcagtgcctgcacagccttccaaccagaggcctgcaaatggtagagtcgtccatctggatcattctgcaaattgtgaggtcaaattgcattaataaaaaaaagcattccccttttaattctctttctctttcagtttctcatcagattgggatgagatgcagaaatgcatcagattgggaaacacacctaatcctttgctaagctcccttttaaacaacaagcccaatctctggtaggcaagggtgtcttggtaaaacctaaatagaattgcctagtttccattatactcattttgacagtgaatcctttagaataggaagtatttcttgtctaaagtttctgtttagatcctatacatgaagtttttaaaagcaaaaggaaatcacagctcagccctttgcagatactctgaacatcttgaggagaggcagggacaaccggaggtagggaaacggggtctcggatgacaagcctcagctctgggaaagttctggaggtggcaggacagccaggccagagttgtccggtggagacttggctcctgaagccagcggggcacccctgagcagcaggcctttctcagagcaaacatcagtctctctcctctttgtccttaatgaccacagctgggtaggggggagaggctttaactcccaaggaggctgtttgtatccagcctgcgaggagaggcctaaattggcattccacatcataataaaaaaattcccagcaattattaaaagattcttatctcttgctccctacatggataatgagttccttctctgctggactgagacaggctgtctctgctctcacttaatgaaacaggaccaagtttgcaaatgagcttgccccgtctctccccttaacctctgcttgtggagttgtacatcaaaccttctggcttctgtctttccttattaacagcccgtaatcttagcagggcccttgccttggcacttcctctttgcatgtacaggtctggttttcactggacctaatgactgggggtttgcctttgtctttctgggactgaagttttaggggatccaggtgcttctggtttcatcaaataagaaggctaatgaacaatgagagaggggaagaaagagagggaatgtgtgtgtgatttagctgaaaaaaaaaacaccaaaaaaacaaaaaaacactactgctttctctttgggagacattggtgctggaacctgtatttagcaatggttctgtttgaaatcctctacccgcagctctgagttccagggattcatttctttccccaaatccagcctactttgcggggtaggatcaggtcagctgagtcatcttaacaaaagtcactgcattttacttttctaagtcacccctcttggccttccagggactttcctttattttgacaccatttcagcaaaaaccattgaacagggataactcttttccgtggagtatttgactgctttcctcaaagtctcctctactcctagggaaggaaggagactgtgaacatgagttggagcaggcagttttatggaataggttgatccgtcaggccttttgtgtgtgtaggctatctgtctcatagcatgggaactgatggactctgctcccaggacatactggtgctgttatctggtgaagtgcagctgatactttagctctgagatgaattttacttgggatacgaccagccaacgtttcaggagagcttcacttactctttcaggtgctgttctagttgtctgttgctgtgtaataaagtgctccagaacctagccatcttattgaacaaccatctattgtacctcatgattttgtgagttaggaattcaaacagggttcagttgggctgttcttctgctccttatggcactggctggggtctctaggttttattcagctggtgactggctttgtctaaagctccaagatggctttggtcatgtgcctgacaccttggggaggatgggttctctttgaatgctgtacttaactgggttgctttacatctttatattctcagggcctctccagtgatcttccaacagctattagactttgttttcttttgagataggttctcactctgtcactcaggcagtggtttggttgggtgaggggtaggatggaagtagcatgatcatagctcactgcagtcttgaacctctaggtcaaggtgttggacttcttaaatgattgttcaggtatccaagagtgtatatttccagaaataggaagtgacagctgctggtctcttgcagcttgggcctcgaacctagagtacatcacttctgctgcatcctgttggttacagccaccatcaaacctgcccagacttcaggagaaggaacatacattaggagtaagaacttggttggttctcagtctaatgcctacgaaaaaaggtaccagcaacacagaagttccttgaaggatgctaaaacttttctcttgataaccatgactgaagattaatgctttagggataggcagggatgctgaatgaggccagcttgccagtctctatatgacctcaagtttagaaagtgacagtgacagaagcataattttggatacccatacatgttaagggaaactaagatccacaagccgatgaagatgtggtctgggcttcatctttgctgcctgccagagtagctcagggcaaaaaccttaaaatgatgccagcctcttttgccaattgccccccatagatggtcccttgcagcctgggaaacagggaaaccaagagtcacggatgtcatttacaccagaagagtcaagcccttggaagagcagctgccttccttcctttgctataccaggagctcctgggagttacaggaagctccagttaccactgcctccatcagacgggatccttcttcaggaatgcaagctttgacattgcatctccagtggcagtctcttctgtactcccagcacttagcatgtaggccctggaggaatccagaagcagtggctccttccttcctaccaaggcaggaatgttaagtcacctcttcatgactatacctctgccccccattattgttatctctctttccagtcacaagcactcctgagaaataaacttcagatacgatgtgcactgactctccttccatgtttttttccagctcagcacctgaagtgcccattccatttaattattctctgagacactgaagatgggaggaggctatctttagtggatcccaaatctagctttgcataacaaataacctgtgaaacttaagattaaaaaatacaggttcccggaatctccttaaagagatcctgattcaagaggatgtcagggattcgtatgtccccaactcctccctggtcattttgatgtgagccaggcttaggaaccactggcctgtgtattttattaactctgagggatgcagggcccgcatttcaaaggatggggccaattagccctcccagttggtaagaccagcttgattattgaggaggcaaaggcctggggtgtgttttctatagttaggacctgacccatgacctcagccagctgccttgcaaatgccagtggtcaccagggcaacccagccagagagggttaatgattcagagcaaatgcatcttcacaattagtgtgggaggagagggaaaagaaactctctaactaagaacaggccatgctgaatctgtcacctctgaacaccatcatcttttattctgaaaatatgtagtagacactgatgcctcctttgcactttggatgaagtttaacactgtctgccatctcaacaatgttacctactcacatccctttcttccaaagacatctttattaaaacaaagatgaaataacgcacccatgtaaaacagtggttaagacataagttctgaatttaaaggcctggaatgaaatcttggctctgttatttgtgagtggtgtgtgtacaagcaagttaataaacctttctatgcctcaattttctcattctgcaaaattctgataaaattggtaactttttcttaggataaaagataaggtagtacttgtaaagtacttagcacagtgtcttctgtatggtaagcactcaagaacttatcaccgcttttattttattttattttgataaggacatttaacataaggtctgctcttttagtagatttttaagtgtgcaatacagtattgttatctataagcacaatgctatacagtagacctctggaaattattcatcttgcataagtgaaattttattcctgttgataaacaactccatattttcgttcctaaagcccttggtaattctacagtctgattctacgggttagactatcttagagacttcatattaagtggaattatgtagtatttttcatttggtgactggcttatttcacttatcataatggtcttgaggttcattcatgtttttccatttcttctttttaaatatcaaataggccgagcgtggtggctcgtgcctgtaatcccagcactttgggaagctgaggcgggcaaatcacctgaggtcaggagttctagaccagcccggccaacatggtgaaaccccgtctctaccaaaaatgcaaaaattagcccactggtggcgggcacctataatcacagttgctcaggaggctgaggcaggagaatcgcttgaactcaggaggcagaggttgtggtgagccgagatcgtgccactgcactccagcctgggcgacgagagctaaaatttgtctgaaaaaaaatcaaataatattccattgtatgtacctaccacattaaaaaaaatccattcacctatagatggacatttaggttgtttccttatgttggctactgtgaatcatgctggaatgatcttattgagatcatgatttcaacactttgggatacatactcagaagtggaattgttggattatgtaattgttctatttttatttttttgtggaaacttcaactgttccatagccattggacaattttgtattcccatcaacagtgcacaaggattccaatttccctacgtccttaccaatacttattatctttggttttcttgataatagtcatcctaacaggtgtgatgtaatagctcattgtggttttgatttgcattttcctgtgtagttgaacatcttttcatatgcttgttgcccacttgtctgtctttttcggggaaattgtaaacgttctagaagaagacatacggaaaaagcttcatgacattgatcttggcaatgcttttaaggttattataccaaaaccacaggcaacaaaggcaaaacaaacaagtgggatcaccttaatctaaaaagctctgtacaacaaaagaaacaactaatagagtgaaaaggtaacctacagaatgggagaaaatatttgcaacctatatatctgataaggagtaatttaagcaacaacaacaacaacaaacccacctccaattggccaaagtatattgggggcatctgtgatgccttcttcctttcttgtctctcttctctccagctcacacccaccattcaaatactctctgatccagcctattcttcttaccatccacaaaaatgactgtccagactttgccttcaccacctctgacttcatgacaaacattgctcccagcttgtctccctatcaacaatttctcctcctgtgattattctccaacttggtccagtgagacccttttaagatatgagtcacgatgactcattctgcgtaaagaacttactgatttccaatttaccgagtttaaatcttttgcttggtgcacaaagcccttcataacttgccccaaacttgccctctagcccactccaatttacttttctgtgtatggtatataccaatcagaattcagaaccaaaccagaatttaccaatccagtcagaacagctgcatagatgtccccatctgtggtttcctctgtaatttttttctttcggccaagatatcgattaccttcttttctttatggtaagcctcaagtcatccttaaagacccagtcacaatgtcaacagtccttctttgatgtccttaggtggagtcagtctcctctgtgttcccatatctttttctcccccatctctatttaagagtttatctcaaagatatagggtaagtatctgatgtttaggctaatgtcatgatgaagaggtcgggctctaaggtcacatagtcttaacctagctatgcctcaatttcctcctctaaaaaatggagatgattaagtggctgctatccacagttattgtgagaattaaatgaaatcatgcaagaagaatatgtagcagagcataccagtgttaaattaataccagctatttttgtttgcttttctctctgtaggttactctttcatgtgagtttctgaaggcagagcccttgtcttttgcatctgtgcatgctgatctcccaagaccaggcctagcacttactagctgcatgatgatgttggaaaaaagaaaaaaaaagcaaataagtgaattccaatcctgagttaattgttaataaatataccacctgactatcctactacatgaaatgtgggaggagttctaacctcaaatatgaaggccctgccttcctctcccttatttttcatttctactctttatttcttcttccttcctccctcccttccctttctttcctcccatcttcctcttcctcttttctagcctcttttccttccttttcttcttaagatactaagataataatttattaatttacattggagaaatattcctgttgtatgaacaataaacacttttattttagggatcagcgatcatattaccaatttctatctactgggagcccagaaagtaattaaaaattacttgacttactcggtgaggaacagaagtctcctcacaacagccacataattaaacttggaaaaggattctctcccccagccccacttcaaggcatgagaagatggtaggttcaattgacattttaactgagagcttataagagccagaaccacccagcaaagttgctcctagactcctaaaactttgaaactgtatgagataataaatctttgttcctaatgttaaactgctaagtttgtggtaatttgataccgagcagtagaaagcaaatacagtccatatcaacaatgtgttctctctttacagacaaggaggaaaaaatggaacttataaattgatcataacaaataagtatttaacataaaatgcaagtggtaatgaatcaagtgacagcaaatatttaaaaaccaaagtgttattattaatatggctatagtcataaatgttagttgtacaaattcaaatagtatacatactatgaagtataatttaaactgtctgtcttccatgccccagttctatgtggcaaaaccagcaatatgaatttctctaagactatgcctgtatatatataagcaggcatatagtgataccatatcttgcctcagtggttctcaaagtgtggtactagaatcagcagcatcagcactacctgaaacttgttggaaatacaaagttttgggtcttggccatgacttaaatcaaaatttctgaaggagggcacagcaatctgtgttttaacaaaatattcaggtgattctgatgcataataaagtctttggactctacatattactctgcaatctgctcctttcactttgcagaccttgaataacttttcatgtcattgaatagatgtctgacacattctttaaactgccatctggtcctttatcttatgtacataccacacttcattaaacaatctcacattgatctctgtttccaagtttctttagcgtcataaacaaaattaaaataaaaagccttgtattatgatatatgtatatatctaaatgtgcatgcacatacacatatacatatatagctaccacatatacaaaaaactttataaaaaattctctaggagaaattcttagaagttatattgttgggtctaagagtaagtacattttaaatttgggcaaatttgataaattatcttcaaaaatagtacatcagtgtttattagtaggtctaatcttgaaatctgcttccatctcaaggattattaacatttaaatgtcactttgatgggctaaaaccattactccctttatactgcatttctttatttatgagtaacattaagcatttttcatagttttattgacttttttctcctatgaactccctttttcagataagatcctttccaaaatgaagattacaacaaagagcttattctgactagtttgggaagtcattacaaggtttgaggaaaactcacattatgagcatgctgccgattgccttgagtgttttcttgtgatttgtgagtagtgattgatcataatcaaaaaattaatcaccagtcagccctagtgattaagtcacagtcatatttgcatatgtctgaaaatttgtgcaacctatagagacggaaatttagatgaaagttatcgatcatggaagctgtgccaaaggtgtcagtcacgggtatggggatttttactgcagcatggctagatccctaatggttagctcactggatgaaagggaacaggctgggagagggatgtctatgtacagattagtggtttgtttcgcttttctttttttttttttttttttttggagatggagtctcgccctgtcgcccaggctggagtgcagtggtgtgatctcggctcactgcaacctccgcctcctgggttcaagcgattctcctgcctcagcctccttagtagctgggattacaggcatgtgccaccatgcctggctaattttttgtatttatagcagagacgggcttttgccatgttggtcaggctggtctccaactcctgaccttaggtgatccgcccgccttggcctcccaaagtgctgggattacaggcatgagccaccacacccacacacagcctactgttgtttttttttttttgattttttgtttttgtttttttcccctgctagttatacatgtcaccattttaccaatgggttattttgatttcaaagaccatggtgagaaaaatacggacagttcagggcaaatctaactctactgctcaggtagagctcagagtgtaccggcatagaataagtctgaaacaccaacatcatgagctgatttagaataaggtcagcaaacattttctgtaaagggccagatagtattaataaatatttttggctctctggccatacagtctctgctataattgcttaactttgcagtcatacctctaaagcagtcattgacaacacaaaaatgaatgtgcctttatttgcaaaaaagcaggcagtgagccaaatttggcccatgaaccatcgtttactggtccctggtttagataattttagtgttcattactaaatgaccaagagtttgtagatcatacctacagtcaaacatgaatttttcctagtattcttccttcccctacttgttctctttgtttatttttccttctgttttacgttctccctcttcttttcctcttcttttaaataactgggtaatgtgaagggatgatttcttaacatctctgtatctcaatttctaaatctatcaaatgttaataataatagaacaaaataaaagagttagtgtgaagagtaagttaaactaaaaaaaaaaaaaattctagaaaatgctttgagagatatacacatctgcctatatgtgtgcctaagtgtgaaatctcaagatggagaagaaataaaagcaagaaataatatttctgaaatgaaatatttagttttcacacattggagcattctttaatccaagttctcatccattatacaatggcaacatgttttatatattgtacaagctgtaagctgtgaagtgggtgcttttctccttctggcattctcgttctgcctggtagatggagagctctccattcttttcacctggagccagagcatctgctatagacccactgctatttacttggtggagataaactgtgtatcatctgtctacctagaatggatctacgttaatctgaatcaaacttgattttgcaacaatttgagcactttctattgggtagatggacatttcaccagtccacaagttctagctgtatgttgttccaactatagattctgaattctgtgccatctccactagttcttgcttaagtcctaatatgacaacatggcatcctgaaatatgaacaggcaatctgaaggaagttgaaaaatacatgcttataatcacacagctctgatgtcactttaagtagagtcagtattacttttgttgttatgggttgagttttctcctctcaaagtttatacactggagttttaaactctatgcctcagaatgtgcccttatttggaaatagagtcatggcagatataactagttaaggtgaggacatactagagatgaattggcccctaatgcaatatgactgatgtccttattaaaaaaagagaaattttgagaaagacaaatacacagggagaacgccatgtgaaaatgaaggcagagatcagagtgatgcatctgcaagccacaaaacaccaagattcccaacaaaccagaaggaaggaagaagcatgaagaagaatcttcctcacagtcttcaaaaggaaccaaccctattgataccttgatcttggactcccagcttctagaactgtgagacagtcagtttctgttgtttagccaccaattcttttgtactttttaaacagtagccctagaaaactaatgcatttgtaattatactcttaataatagtagtaataataaatcacaaaaaactctgtattgaacaatagttatgcaccagccatgtgctaggtctttttgtgcattattttaatttttgtcctcccaaatgcccctatgagataggtaccactattatccgcattgcatagacaaggaaacccaggtttaaagcttaaagggtttaaatattattttcagggtcacacagatgagaagaggtggagcaaggatttgaaccaggccatcttaatgccaaatcttgtggcctggtttgcttggagaatctcagggagagaaagtccattggagttattccaaggagtattcacttcccatcagcctcagtaaatgagaagtaataagagatatggaaagtgtgatgttgacaatgcagcagttaagtgggagagagaagtgcaaatggacaggtggttatttgtggtgctgctgattcagatctcaggctcacaggtctgagtcatttatttgtttgtcctccaatgttctgtgcttgaaagcaatcaaggtactggccctgtaccagcttccctgagtctgaggtctctccctgtaatcactggcctgttcttctgcacaacagttctggtcatgaattcaatcatgaccactcctttcttcattaggcccctatggaagccgctgaaaatcacacccaaaaccagttttaaggcttgagtccatcatgctgagagccagcaggtcaggccagaactaagttcaggggttaactggaatcagaagttcggaacctattaaattgtccaattaattatgtgtgactcctcccttttcctctccctttttgtcttcacacctgagcaatggacagtaaaaaaaaaaaaagcggggggcttgctgcacacagatgtccacctttaacctgagaagtcagcagcacttatctatcattgcggtcaccctagaaaacataaatccagattctcggtggtctgggaaatggtgctttggagaagagcgagcttgtggcataaactcagggtcctcccctaatcttgaggactgcaagcttaggtgttatctagagaaagtgtctagaggcagataattgatgctttactcacagtctggctacaaaggctcaaggcaggcagacatgagtttccctcctcgccatactcactagtcaagtgcctttgagtaagttttgtatcttctttttcctcgtatacctgactcacaaaatgggatatacagaccttgtggtgattgtgaaaataaaatgaaatgttgcctccaaagcacttagcacagtaattgaagatgcagcactttctgagttaaggccagttccttgtgaatactttgctgttgacaacacaagcctgcttcttccctctccttcctcctctctgttgtgacaaactgcacgacaatggctccaggtcctgactgatcccttatgttaatggtcctgactcctaagacagcttcccagatgctgtcagacctcagcacaaattattggcttgaacttcactctttacagaaagatgggtcccatgtggaatggatctcagcttccagaattcactgaggggtcctttcctgctcgtttactaggtgggcccccattggcctgagggagctaatatgtttcacagcgtgttttgtagattgcatctggccagatgtttctctgtgtgggttcccttaagcaatgtgggagggaaggaacaccctgatgtacatggaatttcagccaagaggcctggtgttgcatcgccttggtctagaccaacctctttttttgttgctcccagggagcaagattgtattccagaatgaaagctcagaggcagtggacccaaggccacttttctccccttccattaggcacatgtcaaagactacttctattgatgacacagccttcagcttctgggatatacttcaagaaaggagcccaaatacaggctgttataaaacattgtcatagtcatgccccaaggtggccacgcaaagggtacttgatagtggccaggaaaaccatatagcttgttttacagggacagtctactccggaatcccatccagtcctatgcagcatccaatgcaacattcccgccttccactcaatttcagtctgagagtatatgaaatcttaattatggctcagagtcaaagcttttccacccaggagttcagcagagatacatgttcttcatcagaggggtagattatggagggcaccagcatccccaatccaggagctgaagggcagctgtagaatgctgtcaccgaggtgtcagttatttaaccaaacagaggagacccacaaaaagtaaagagaaggctgtctggccagacttagaaaaaaaattagggatattgtgtttctctctcttggttgagggatctggatttttaaatctaaattacatttatgggtgctaccatgtgtgaggcttggtggaagatgctggtgaggccaaactccctggtcctgcttccttgtaccagtgtttcatcaaagacagaaggattgggtgtcgtggtttcccagaccacagtagcctagagaatgtgattttagactgggtttaagaataaagggatgagggacagcagcgtagtagtagcacaacaacgacaacactaacagacaacagagaaggcgaaatggctcctgtaagtgaggcactttgtatgtgccattcctgtgctgagatctttataggcatcatcccattttattgttacaaatccaactgagctggtgcgtattataacagaggagaaaataggtgctgagagaaagaagaaatgacttgcccaatgtcacacagtcaggaagtagtaaagccatttcttgaatctaggtgtgcaaagcctgagctcttagctgtcatgtcacctgccttctggagatgtattagtttgcaattttctgtatttctaggacacatcctcccccagactttaagctgggttaagtctctgctttgtgccgttgttatgccgataaaactttccttggttttgcagtagctgtgcttttccctgcagagctaccacattccaggctgtaagtttggctggcattttgctcaaaaagtatgaggcacaggaaagcctctctgcaaaaaaagttaaaataattttattataacccaagtgagaaccaatgcattaccgacattcgtggtggtggtagttaaaatagtaataacagtgattggggcaggtaatactaaaaaagaaaagtagtcagagtaattataataaaacaacaatccctagggtttattaaacacttactatgtaccatttgctattgggacccctttgtatgtaataagtcattcaatcttcaccacaattctcaaggcctgaactaaagtgaagctgcgaatcccctaaggataacttttaaggaggccttcactgtcagttgtaaagagtaagggcttccttaaacgtggcaccctaggggtccctcttgcctcaccctagtcctggccctggcctagaagggttgtgggtgaaatagtcacaatcacaggaactttttgaaaaagtaaactgtaacataaaggtgttgataaattttctgggatcacacagacagcaagtaacagaattataactctaacccaagcctgtattggccaaagcctgtgtcctttgtactaagatatgcattgtttagtttctcaccatcatcttacaggaacttagtcatagcatacattctaggaccttttactggagtgttttctcagagtctctatcttcacagagtatcggagaggagagtatcaagaaatgattttatttatgtgtgcttgcatgtgtgtgtttatctgttagtggttttttttttttttttttttttttgtcacccaggctgtcccagactcaagcaatcctcccacctcaccctcatcaccctcctgagtaggtgggactacaggcacccaccaccatgcctggctaatttttgtattttttgtagagatgaggtttctcgatgttgcccaggctagtctagatctcttgggctcaaacaattcttttgcctcagcctcccaaagagctgggattacaggtgtacaccatcatgccaggccaagaaatatttaaacagggaagagaaagaggaagagaagaaaagaagataaggaaggaaggaaggaaggaaggaaggaaggaaagaaggaaggaaggaaggaaggaaaggttgattcagaagtcagtgtgaggagatacatactgaatctcacctcatattgtctctctctgtgtactaggcagaaaaattttttagttcccatgacataaacccaactcacagtagctcaggcaaaaggtgagatttattttttaaatgtaggattatagaacacattaagagaatagctaaaaccaaactacaggtaaggcacaggtaatgctggtttcaggaataaaatagggaaacaaatatccttttcctttctctctcgctccctctctctctgtctccatcatcatcaccatcaccagcatcgtcaccatcaccatcatcatcaccatcatcatcatttccacaaggcttatagggtttctgcttaaatagaatcttggacaacctcaactgaaatttcacactggaattctcatggtaggtacacagaggaggcctcattatgtgtgtggaggcaatcatattacaagaaagaatatgataagggcatacatttatgtactgcagagtttctaggaatggagaattaacatctggcgacgaatcagagaaaatgccatgaagaatatgatatgatagcatggatgggattttaacaagtaaaagtatgaaaccaagacttagacagggagggcatagcaatgagaaattctcagaacaatacttcataaaacagtcagtcaattacaagctgttgtatttgactagatcatagattataaatcatggtattgtggggcattaggcaaaaaaagtgaaaatattgtagtggaagtcttcgaatagatggaacaatgttattcacttgttcattcattcactcacttattcataattaatatttattgtacacctattagtcacctactaagtctgttggtgcaaagatatttgcggaacatgaataatcccaggttagagccattgatcatgtgaataggagctacaagtaactaagcatagctgattgttcagatattatcaaatagtcctcctaatctgggagttttatacagtattgacatgccgacaaagtggaaagccataacttgcatctggctttcaatgcagagactatgtgtgaaggaatcaaggagctcagaagcttttcaaacaggggaataatatgtgattccatttagtaacttaatactagtggctatagccaggagaaattggacttgggagattatggaagcagaaagaggtgtgtgtgtgtgtgtgtgacagagagagagagagagagagaaagtttttacaagagtttgggtaggaagaagcaataatttgatagatataaagcacacatttgggaatcaaagaggaccatggaagaacatttttagaggacttgatagcctgttgggtatgttgcctattaagggagattgaggactttggtgtctgggtggatgttgatgccgctgaaccaaacagagagacaaaaattaggagccagtgtgagaaacagcaaggaggtaggaggtaggatccgtgatattataaatttaacaggagaagctgtaagttgactagacagcattgaaattggacaaggaggctgagattggagatatcaatttagtcttcagtctacagtggcccttctccatcaggtttcaaaaaaaaaaaaagtaaacacactaatgtcttaaggcatccattgtacgtaatgaattaacttgcttccatgaatggaaaagaagattagctccctaccatctctgtgaagactgaggaaagggtaactcaaatcactttttagggcttaattttctcacatgattttatttgagaaacgttgatgttaagataatagttgctaaaaatggaggttaatgaagacattaataaaaagagtataactcatgtataaagggacctagggtaaaaagattaggtaggtctaatatttaggaagcaagagggaaaataaaggaactggtatggcaaaaaagaaggagtggccaaagaaatcacagaagaggctgggcaccgtggcttacgcatgtaatcccagcactttgggaggacaaggcgggaggatcacgaggtcaagagaccagcctgtccaacatggtgaaaccctgtctctactaaaaatacacaaattagccaggcatggtggcacacgtctgtaatcccagctactcaggaggctgaggcaggaaaattgcttgaacccgggaggcagaggttgcagtgagtggaaatcgcgccactgtactccagcctggggcgacagacagagtgagactctgtctcaaaaaaaaaaaaaaaaaaaaaagaaagaaataagagaagaaatgacccccatgccattgtttatgcagacatgccaaaaatgtcccttcagaacacacaaaattccctctgcgtgtctttattgccatatttactgtattattttgattagttactatcttatctctaactaaaccttgaagcaaagaccacattacatgtattcttgtggccccattttgtagacatagagctgtgccactcagatcctcattcatggaagaacttgtcccaactctcagctcctgcagaatctgcctcagctgcaggaatgtgctttgtccaagggtatgcatctcccatggcagcccatagccagtgggctgatcaaggtgcggtaaaaaggcctggtagcttcatcccaatgtggaaaactctgatgggatgtattccagagcttcccatgggccactccagagcttctcctaggtcgtccaagtcagacctctaccacaagctgactactccatccacctaattttgcttcttgcttctcccttccaaaagtgtctatccctaataaaacattgtatgttaaaccctgtcttagcgtctgctgtgaaagacctagccattaagtctagatactgagaaagtcctcagtagctagaacaagatctaacatacaaaaagagattagtacctttggtgtagagaaacaagttgtgacctcaaagttgcatattttattcatctgttcaatacaagttaagcatctactgtgtgacagactgtgttctaggcaccagatttttacatagatggaattggtctttggtgtctttaagaacagtcaatcagggcaggggcactaataaaggattataaaatgctaaggaggatgggagttgaggtgggtcagtgctgtgttaaatataacccattatactgaggttagtaacttttttttcaagagttatagaagggcaagaacagaaagagatgaggtattgctcaaaatggcatggatgagactgatattgctcatggtgtctgagatttcctttccccattggcactctacttgactatgcaccttagccttcttgcatctaggtgtggcaatgtgattatttttggccaatgtattgatgtgaacagaagaaatatgcatgacttactctcctgggccataaaactgcccactgaagattccccattttatctttccccatactgcaacagaatggagaggaatacaagggcccagagaagagcagaacctccagaggaaatgagcaaggatccctgaatgactttatggagcagagaccctctgcatagacccacactgtactctgatgtaagcaagaaccaaactgttgtttataaaactactaagattttggagttgtttgggaaattaggtagcacactccaactaatatatgtggtataaaatttaaaagaaaatttttttccttagagtaggctagtcttgactacatttagaggctaagggtatggtgccatgaaatataaattgaagaagcaaatgagagaatggataatcgttagagcaagttccctgcggcacagaaggaagtgacccagaacaggatcttctgttctcctgtgctttgttgtcaagaaagagaagaatattggtcatttttgttttagtgcttttactactaattattaactagagagaaatgatgaaaaaagaacaaggataacaaatatatcaaaataacaaaggttcaagaaccttttcatgttattacacacatggtgtgtttcaggaaaaaaaaatcatagcaaggaaaatgtgagtttaaatcctggctttgcaatatttttgttgtaaaatatgaagacagtgcattctgagattattcacttggttcagttgagacacaggtaaactgatgtacatctcatatggattacttttttgtgtgtgaaaacaaaattagatctcatgtcattagcacaggaaatggaatattttgaaaattataacaatagctaatctttattgaacagttattctgtgtcaagtactgttctaagcaaatataagcattaagtaatctatttctcataacaactcaatgaagtattgttcttttactacacccattttatagataaggaaattcactcacaaaatattaattgccagtgcttttctttgggtagagagattatgggtatatatttcttaatattttcatattttataagattgcctatgtggcttttatatttacaatataaatgctattttaaaaacaatgacaatattaggcttaattttcttttaaagaaaccagaagtatggctcttgaatgtgacatttaccaaaccccgactctgctaaggcatttgcaaaggccctgaggccatcctccaatataccttaatggcacatagacttggtggtataatcaaccaaattagatcagtgcctgctctttgccctctgaatctccagctttggtggcacccagatcagtatgacaaacccttctaggcttctttctatggaaagtcttatgggtggtttttcgctggataactgagtgctcttggaacatgctgttgaacctccctcacgtcaccctcctgtaaaaaggatgtgttggttgagtatcccccaaagtctgactttgagataggaatttcagcataagtagtttatctgggttgcgaccccagcaggcacagtgagggggtggagaaatgagtcagggaaaggaagagaggcaataaaagtggtattaactagtgtgttatcgctacaggaagatgggcctcaattccattggggactcctaagagcctgtgcagaacataccttggaactggcctgctatggggcaaagaagttggaatgtcattcatcaacatcaccaacttttatccttaattattataaggttacccttggtggtgtcaacaccttcaggtttctgggtgtccagcgcagtgggccacagttctcctgtggccagaggacattctgtggcagagagacacaatttcctttgacgtatatggggattcttgttaggtgacctctggggtaagctgatgggggacagggccagacaccaacagtatctgctacagatgttaaaaaaataaataagatgacacatttaaggatttagcatataaatgcttaataaatgctagctgccataattaaaatgatagcattagcactatcataactagtgcagaactcatattaaaatccaagttttgtgaattctggtctcagagtattttaattaatgggggaatcttcatgtttctttttcatggttgtatttccctcgtttaatctttatgtttgtgtaaactaaccctcagttctccattcttagggtaggaataattaaatgggaaccatttttgcagactaaattttccatctctgaaattctgtgcttcaccttaggaaaacccccaaactaacattagctactattgttgttttatttctttaagccatgccacttatggctctggggtcaggagatagacatcttgtttttatgaaggctcccaaggggtgaactgcagtcaaaccacgtttccctggaagacttcaagccattttagctgctcaatggagaacacatcccaggatgcaggcaggtttccaagacaactgggggtttgattgttcatagaaggatggccaaagcagctgcatattggtgctttggaagtctcaaactattccacaagagctttgagttctgtaaatccaaaacatatttgctacaaatatttttcttttcattttttaatcacatatatattacaagggaaatatattccatctgattttttttactcacttatattgtccaaatgaaattttgaaatgtatttgatgttctataatttaaagaaaaattcactataatggaaaaacatatttggtaaaaggcaagtgcttctgctcttcatgctgctagtgactgtgggtcactgaagtggcctcagagtcaacacaatgaattggccatgtcgtggattcctttgaaggatggttccagctctctcagtggcagatacaatgggtaacaaagggctcatctaattctattaatcacagaaacttggcaaagagaagagtatggcataaagaggttcaaggacctgaaataccagtgagtccaacctcactttattttacagctgaggaaactgagccccagaggggagaaattctttgcctaatgacacatggttaattaaaggcagatttggggtcataaacttaggtctcctgagactaggagcagggtaccagtattctttctactgtctgtgctgtaaagcatcaaagcacaaatacaaaatctgactgcaaaactgaaatcacaagtgtgttcaagaatcatgggctgttatgaattttggaggaacagggaatacagaagttttaaaaacagactctccttcaaagagcacaggctctggggtaggctgtgatgtgctcctgttgcaattttactacctccctaatgataatgactttgggaagttacttaactgctctgagtttctgtttcctaatctgaaaaatgggttaaaattagcatccacacatcagattgtcatgaaagttagataaaaacctggatataaaaacacttgctacagtggctaccatggagcaaatattaaaaataaaacaaataaaaacctttttaaaaaaagtattactattaacattattattcaatgatcttactttccaggacagtgcttcctaaaactgtgttttgtagaacactaataccagacgatggatgtgaattgatgtttgggtttgtgtttgtttgtttgtttttgttgttgttttgagacaagatctcactatgtcacccaacctggagtgtagtggcatgattatagctcactgcagcctcaaactcttggggctcaagcaatccttcctcctcagcctcctgagactacaggcaaacaccaccacatcctgtccagctaatttatttattttttgtatgtggagacaggttttcactgtgttgcccaggctggtcgtgcactcctggcctcaagcgatccacataggcctcccaagtgggattacaggagtgagccaccatgtccagtctgtgaactgatataacaaacaaataagtgcaaagaaaatatcctatatttcagtgtgttttgaaaatacatactccactgttttcttggctattcttaatgcataatatgcaactggtagtctgtaagaaagcattcaggagagaacactattaaattgtgttgaatgtaatgtaaccaaaaatcatgtatttttctttttaataacatgcataaattaatactgtatgcaatagcattctgttatatatcagttatgagaatgtcagtgtaggagagataataggtagacacaaagctataatgcacatggatcatgatccatcatcaaaagatgtgtaaaggtgactgccaagaagcattcctcttccaaatgtgtctgcttcatggattcttcatgaaggaaaaattattacagcagaagagggttaggggttactcagagattgaagtgaggaagttcctggacacaaaagtaagaaagtgctgaggaagttttggagaacagcaaaaatccaactttacaccttcagcagtgggcaggatttgggggaagcactggctagagattgtgggaccagcttatcttccttttcttttccaagggccggaagtatgcagggtttatttttacatttacaacacctagtgcagggtctggcactaagtaggactcaataaatgtgcactgagttgagaccagatctaagtggatgtgaaaagccatgacaaggaatctggatgctatttggcaggcaatggagagcccttgaagcttgctgctcaggggagtgacatattcagaaaagtacttagagagatcggtttggcaccaggtagaagatggaaccaaggagaaagaaactggaggcaagaataaatccagaatccatgcactattttaaacaagaagcaactgaactcatggatggacagaggagtggagatgcagacaaaagagcagctgcagaggtagaaaactaacagaaccttcagtaataatatttcttaagttaaaagaggaaaattaacagggtttcatcaatgatttcttattgtgcaaagaaaaagagatgaatcttgagactctgagctctggttctcttaaaagtgagagaatggtagtgtcaaggacagtcaaaacgagtggggaaagtagactgttcgaactgtgtagaaagatgagcccagatttgaactttgagtcaagcttgaggagctgacaggaaatagggcagataatcagaaagaacttggaaatgtgcaacagaaacatggaggataaattaaaaatgaaaatgtatatctgggatccacctgcatggagctgagatccgatgttccgtgagtagataggagggtgatttagagacttgagggaaaggaaagtgaaagtcaggagcatcatttcccaccattgtccacagctgcagcctgacacagcttgttccatgcccaccccctggaggcagatggctacgtgcaatcacaccgctgtccagtgcctgagtcaaccctttagctctggtctagctccccctaggggtggagtttgagcatggtcttgctgttttgtctaggggcagccctaaacactcacctgcccactcaattgaattttttccctgcccctgtagttgtcttcagaatgcagtctcctaaataagactacttggatttgaacttcagcactagaagaatggaagagttttttttttttttaacttctctcttccttttcataaataaaaataatatgtatgtgatagtgtttgcttatgaagagtaaatgtaaagcatttggaaaattcttgacatatagtagaagcttaatatatttttcccattattatctgttttatcacaccagttatttgtgcttagtactgatgcctgggcttatgactcagttttcgtgaaattattagaaacctgccctgaagctctgttcccgttgcaaaacaaacaaaactcagtttaacttgggtcacctccagagtcaggctcttgtccaccctaacccctgtttcgagactgtactgactcttgtcatcataggagaacagaaacttccgcacccctcccatcactcactcatttattaatttattgaatcacccattcaactaagatttattaagcattcactttgtgatgggcactctgtctacaactaccaggtaacactatctggaaactgaggtagccatgcctttgctattctggacactgtaatactgtaaccctccactgcagccaccatgacagcaggaaggattgacactctatcctcacatgaatttccagtgtgctttgaggttgagccaccaaactcctccagcaaactgccttcttttatttatttatttatttatttatttatttatttatttattattattatactttaagttttagggtacatgtgcacaatgtgcaggttagttacatatgtatacatgtgccatgctggtgcgctgcacccactaactcgtcatctagcattaggtatatctccaatgctatccctctcccctccccccaccccacaacagtccccagagtgtgatgttccccttcctgtgtccatgtgttctcattgttcaaaatgatgagttcatgtcctttgtagggacatggatgaaattggaaatcatcattctcagtaaactatcgcaagaacaaaaaaaaccaaacaccgcatattctcactcataggtgggaattgaacaaactgccttcttatatctccccagactcatgagcaaatggtagcacagggtaaaagcccaggaagttcatgctgatgccttgggaggatacacaagagggtcagtactgcttttaccccatgatgatgcaggcaagaagacatccatcctcccatatctgtttacatcagccctgatgcctcataaaacttccccccatacagtcattaacgaggtggtaacaaggatatcaggggcccaggggagacactctgtttgatgttctggatgaaggaaatgcagacttgctctttgtgaaagtatgagggctaacttggaggcctgcctgacagtccctgtaagctcagacatgaagtcaggggaatacaattgtgtgaaagaagcagaacagtgaagtgttgagatggcaaaatttggaagcccaagggcagggagcagaacaggaaaaacaggcataagagttttccatgtgggtaacataaaatgattagtgacatccacatcaacagaaggctccctgttctttgcttgtggtgtgtttttgtgtagacatccacacttccgatccacagtgaagcctacaaaggggctgagcactcttcctgcagtgaacttatacatgtgcaattgtacgtgtctttatttttctctttgttatttgtgctgcatttaaccctatggctggaacattataaatgttgaaaactttgttgaatgaataaagaaataaatggctcaaagatgggaccatttagcaggaagaaggacctgccaaccttctttttctcttttttgtctatggaaccagacaagggcaaaggatagggaagtggcactggggaattccactctagaatgtccttgagactcccagtcattggtagggctgatgcttaccggaccttctggtgccaaagatcaatgtcaccataaccagggtaatgtggggaaggcagacctcagtcctcagcccagaaatggcaagttcttctcaccccacatcctctcacactcagggctggcagcttttgaatggggaaggaccctttgttctacccaaagatgatcatctaaatcagaccaacagtccagctgggacatccacatataccttagtattctctagtatttattagaaattgggcaactctttaccttctaggaacaatctgcagttgtgtggaaggatcattgacattgtaatatcgacagcaaatagcttttgagcacttatttgcgtgggatacttttaaaatcttctacagccattatctcatgtgtcatcacaacatccaagaggcaggaacctttactcctcttgtttagtacataaggaaaatgaggtctggagaggtaaattaacttttttatggttacaatgcaagctattggcaaatctgaactgaatccaggaattcagccttctaagcaacgctcttaagcattgcactgaataattagactcatgtttatatctaactttacatctagcactagatgactttgtggttttaggtctattacatgcactagcctccactgttcttatctataaatggaaaacatagtgtgtcccacgattcttgtaaggatatgtgctagacacctcatcagagcagtgtccagcatataggaggttactttcattcccatcactttggtcattaggagaaactcatgaggaatgttttggtctccagttctgccgagtctgtctcttcctggatctgcgagtatatatgatggtactcttttcccctggcaagagaagggcagctgggaaactgttgcctctcaggataaaggagaattatcttcgaggagtgccaagtgcgtgcttattcataaaacaaacatttatggagcttcaacaagagtctgggcagcagcaactatagcgtcagggactgtgcagttggttcattagaagctgaagcccccctggaggcctgcagggagcgggcctggaagggggagtggagtgcaaaggccagctggttctctggcaacaaagtcaacatcgccccagatgtctgccctgaggttgaggccattagctccagtttacctgttcacttcatttttcaaaattagccacaaaagcctcccacggaaacacaatgggcagcatttctcagcgggggcaaaaagaaaacaaagcatatctttccatgcacttgtttggagtttctgaatgtcccccagagccctggaggcttggcaggcacgatttggattgctcccacatggatgtctgtggaagccccacttttctttcctctcccagattcaccccagctaaggccaggctgtcccacccctgtcatcagccttgcctgagcaccccaaccctaaacccaggaagacaatgactttctcattttcttgctcctttttcctaggggataatattacagtttaaattcctgggttgactttgagagttgctgggagatggtattagctttcaaccacctgatttaatctcttctctcactcccaccttcccccactgctgttcagacaaggcagagggcaaaggggagaggtgaggaggttaaacgcttgactgcagagacatcttttcatcaggttttgttgagagcagggcagacaggagtagccagggtgtccgtagggcaatgacagcttgtgtctgtctcttgctgactgtacagccccatatgaacttatatgggagaaatggggagagagggccaagagaatgtaatgatgaaaagaaagatgaacaaaaatataaatactgaagtataaggctgtgcagttggagctgtccagtgcaaaatacatttttgccctaagacagttctctctaacctaaaaatcaatagaaagttatgcaataacctactgtgtgctaaaaaaaaaaaaaaaacttgccccaaataaaaataaattgaaaatattggtaggagaaaaaacagcttctttaaacacaggccaaatgcaaaacaagtgaagagagaaccctcagatgtgatttattggtttctatttttaatctttggggagtcaagggaataggagagatgccaggagtttggaaactggatacaaggaatgtttttatttacacatgatttagctactaattaaatgtgtcgtttactgtctatcctgcctggaatgtaagtaccaaaaggacagggacttctgcttgcatcttttccattgaaatatcccagtgcagagaagtgtgttcgatttgtagtaggtttggaacactatgtgttaattgagtaaatgacaggaaatagaggtgagtctgcagcttccctcagcaaggtgtttttcaggactactgtttgcaggccaggtaattgtgggggtctcttcttggtttgagtctctatttggagctcccaaacttctctcctcactatgtgtgtgtaatgtatgttttcttgtctttactaaagaagttagtgaaagattttagtatcctctgactcaccatcctcctgacttcaagagctctttctttctgcgtcgtccttggctctggtcttaaactcaagctactttgggtagtgtagtaggctgaacaacaggccccaacaggcatcagttcctaatccttacaaccttaagtgttcccttattagggaaaaggatctttgcatatgtgactaaggatcttgacctgggaagaatatcctgttttatccaggtggttcttaaattcaatcataaatgtctttataagagagagaaaaaggacatttgataaactcagcgatgaagacaatgtgaagatggaggcagaaatttaagcgatgcagccaccagaagctggaaggggcagggaaggaattcttcactgagcctccagggacagtgtgttcctgctaacaccttaattttgtcccagtgaaactgatcttgaactctggcctccagaactatgagggaatacatttctgttgttttaagacacccagtttggggtaatttgtttcagcagtcataggaatctaattcaggaatgctaccctactcttttcccttggagcagagctaagggcttagtcagaggtaaggctggtcagaactgaagagagactggaattaaggacaagaagttggaactgggggctggtgcagtaaagtaaagccagttgctctaagacacgaatggtgaaatcttaatgctgtaacacaatatacatttacatattgctcttataaagcccggttggcagcaatggtgagggtggagattctgtttcatgagaaggactcaactgatggaggctcagccatccttactgcatgattttattgtaacttttgagttcagtggtacatgagcaggtttattatataggtaaacttgtgtcatgggggcatgttgtacaaatgatttcatcaccaaggatcaccgaggtattaagcctagtaccttttatttatttttcctgattctctcccttctcccaccctccatcctccaatacagcccagtgtgtgttgttcccctctatgtgtccatgtgttctcaacatttagctcccacttataagtgagaacactttaattgatgacttttgaggttgtcttgggcatctgcatcaaggactcagatgaagatgggggaaagaggggggccaaagggtatttataatccaagcctgcaaatggcatacattacttctacccatattctatgaagtataacttagtcatattaccccacctagatgcaagaggtctgggaaatctagttcctgctagggtggctatattccaaccacaattttatattatggagaagaagcatgagttcttaatggacaacaagccaagttctcaacaaaaagagagaaatgctacaaaggcaaagggactaaaataaaaacagggtagtttaactcaatatgagtttcatttcaaaagtcacacaaaatattatgaagtagaatataaaattcacatgagtttttaagatatgaataaaaaacataaagcaaatctgcctttattattcatttttgagaagacttctcatccagtaggcttatgtatctactcccctatgccttgcactgctgagaatgtaaacacagagtctgcaaccagcaagaccagggtgcacattctatttcctttacttacttacgtgtgtgaccttgagaaattatttcactgttcttaagcttttatttctttatatttgggaacaggggagtttctggaggtcacactatcttcaggatacaaagacgagatatagagaagaaaactgcctaaagcatgcgcctgtagtcccagctactcgggatgctgaggcaggagaatcacttgaaccctgaacccaggagacagaagttgcagtgagctgagatcatgccactgcactccagcctgggagacagagggagactccgtctcaaaaaaccaaacaaacaaacaacaacaacaaaaaaagaaaaaaacaaaaaacaaaaacaaacaaaaaactgcttaaagtatttatttctgcaccttcaagagtgggatgagtcaagatcatacttgaaatctgagcaaacatagttgagtggccaacagaaactacaatgcacatacctcacttcctgattaatgggcctccctcctggcaaggatgctaggaagagacactggtagcctggtgagtgccacctaggggatgcatggggagcagtttgtgggtgcaaagaaaatgatgaggtcgatgatttgcatttataaagaattaacttggctgggagcggtggctcgtgcctgtaatcccagcactttgggaggccaagacagaagtatcgcttgagccaaggagtttgagatcagcctgggcaacataggaagactccagctctacaaaaaataaaataaaataaattagtgtgtgtggtggtgtgtgcctgtggtctcagctactcaggagtctgaggtaggaggatatcttgagcccaggaagtcaaggctggagtgagctatgatcccacaactgtactctagcctgggtgacagagtgagacctccctcaaaaaaaaaaaaaaaaaaaaaattaacttgagactatctgctccaaagagcttctagatactgttttgtttatttgttgtttgtgccacgatctcgagagcatgtagataattaatcctgaagttgcacatccgcattctatcttctgttcaattcattcatgtaattaaccagaaggaattgtgatataagaaaagaattttacaaaaatgctgctcttcatgggacagttaacctagaaacggaactgtctattgcctgcaaatatttggcttttcctcttcttattaccacccaaaaggggtggctttacttatagggctacctagaggggaagaagaaccaagtcaggctaaaaatccatgacagagagtcaatgagtcaatgagtcaacacacacacacacacacacacacacacagacacacacaatatttaataactctaataattgatgataatatgaaagtctggaagtgtctatacaataaatatgttaaatctgactaaaattaaatgagatagcagaaaatgtaataaaaatatgatataaagaaagaaaagaaccaaatactacttctagaaaagaatagagaaaataaagactttttttttaaagccttcatgaacaaattaaacaccagaatagacacagctgaagagagaacctatgaactggaaaacagatctgaatgcagcactacaaaataaaaaggtgattgatatgtatcgtcaggtctaaattgcaagagatggccaacactggtgaaaaagtagtctactaagaagcctgacaactgcactgagtaaaatatgaggcatggtttgggacaagatgttcagaactaatactaggaacatgagtgggagctggagttttgtttatacattgttgcatagtggtggcattccctaaccccaattctgtgtgaccatgatctttttggtactgtgtacatgcagtctctcacagaattacttcaactggtggtgttactgagagacactgaaacagcaatagtttattcactgaatttttctttaaacacagatctgtatattagttttttaaaagaatattaataataaaattatattttatatgccttcttaaatggtgttcactaatgtcaggcttaggagaaaatatttaagattcagtaggaacctagtaaaactagggctataattataatggaaactgcataaatcgctccctctcttactcctacagccagcaagacctcttagggagttccaggtggatgggaaaaggggaccaaatgagttcatcaccagaagcaggcctcagaagagaaggtaagactcactcatctcctggtgggcatattcttgcacataaaaaggtcagtatgtgaaaggaaagttcttggctactaacgctgcaaccagacacttcctgctgaaaaatctcagaaacccctcactctcacctcacactatcagggctgctattttcagctgtccctctgccctatttgccttcatgcctcagaaggcacagaaatcatagccaaagtttgagctgacaaatgttcataaaaccaaagaattcccaagcaggattttgagcttgaccttagagcagttggtcaagttggagatatatttttaatgtaaatatttctggtaacatgagcttgggatttatgccagcaaagcttctgaggggccttttctcaccctgtgctctgtgcataagtttctccttcttagacacttttcctctgtttaggaacaaactttgttttatgatccctaaagcagttagcaaactgatgacttttctaaagctgaggatgaaagaccatataacaggttgcagagattaagttgaggtccttaagaaacagcttctggtctagatttgacacatttgcagacacttggttctaaactattgttaagcattagaaaagccttgctcgcttatgcacaatacattctaaaatggacttgaggtagctaaaacatataacattaagaaagagcgttagaaatatacaaacaatcagaacctttggagaattaattatgctaaatttaagactaatggagttattacatttgggtaatgcttttgagcttcctggtggccagagttaaaagaaaagtctaacaaaaagaggaaatagaatgatttttagggagaaataatatattatttttcattttatgtatcttgccacagatacagttgaaaagaaatatattacataaaaccttctaatgggggcactaataggtacaatggaaaacgccctctgcagcaacgttaaaactaagacaaaattggtttttaaatgtttgtttgataaatcaactttgatgtttaataaagaactagggtacatagaaattattcaaaaattagttgttgaatgaatgattaaaaagatttaaaagtgttcattttatttaatgacccgataacttctgatggaattaaccagacactatttcctggagtgatggtaatgaaaaccaaattggagtaaagttcttggaaatggatgtagtgatgcagacacctttttgagaatgctgctgttaaaaaaacacagaaaaatagaggaaagtaaaatcaaagatttttttttttaagaaaagagagatttgagcagatgatattctgggaggatccactgtagaaagagtgcaaagttagggatgaaacaaagttgaatggcatctagagcacaggtgggtggaggaactggcctcagacagaaatatggaacctcttagagttgcttttgatctgggtttggtagcattacctgcattgtatttccaccaatgtgaacaattttatgattttttaaatgagttatactgaactttgctttcagatgccgttagggaaactgtgggaaaagcagctaatattctctctccaccctccttcaaatggggccattttctattcccttttaatagttgaatgatttataataagggaaactgtgggaaaagcagctaatattctctctccaccctccttcaaatggggccattttctatcccttttaatagttgaatgatttataataagcatatattactttttaagtaaaaataagtcataataacattgccaaaaaaatttcttcaaatgatatgttcccctttgaacataggtttgtgtattctctcatttgtttgagaaaggccaatgacctcagataatccttgaagttagcactgattttctgcttaaagatggcattgttttgaattgtctaacaatgggtaatctaaatattatttattttatgtttttggatataagttttaggagaattaaaatacatgaaaactatgattgaatataggaagacaagttgtatagtatttataggagaaaattccagcaatagtctcaattgtttgagacttctcactttgtgataaaaattgctcctgtcatcactgtcactgatcttatagacaataattttattttcatttttagagacagggtcttgctctattacccaggcttgagtgcagtggcataagcatagctcactgcaacctcgaactcctgggctccagcagtcctcttgcctcagcctcccaagtagctagaactatagacacatgccactatgcctggataattttttttgtagagacagggtctcgctatgttgttcaggctggtcttgaaatcctgggttcaagcaatcctctcacctcagcctcccaaattgctgggaatacatgcataaaccacagtgcccagccagggtctttagattaggagatttatattatttcaaacagcaaaaatacgcttgactacagacaaaactgaattttaattaaatccaaaatggatcattgaaaatttgtttattttttctgtacacacacacatacatacatgtcaacacaggggcataatttatcttccaattgtgctactttttacaaaaatagtaagaaccaaatgtttaagagtgatttatattttcagtactgatctgtatgttttgttccatgaaaactatgaaaaattttgcagtttcaaatctcaaacttttctgagtaatgggtatagtgaaattcttccatggtcatgttaaatgtttgggcaaaagcagaacatgcttgaagggatcatgctgtataaatgttcttctttctttagatgctgcagtaagcctatctctgcttctcagctagttttagaagtggcattcttaccatcctcagaacaatactcagataggtaagtggaggaagctgcctacagcaagcaagagttttagttgaccttacagaagaagagtactgctggtctcccatcccttccctgtttgtctaagactctgaaattaaaggctgatagagtgtgtttcttgttggatgcacggcgaagttcatcatgtttagcctacctgccactgggcaacctaaaaccaggtatcagaagaaaataaataataatcctggcggagaaaagtgaagagaggaaactagtgagaaagttgtgtgcacaggtgtgcctatgtacttgtgcatgtgaataccagtgggttgtttgttgcagacaaatgtcagtttaataggcacatggcagaaattcctaccacatgagttctctttcagtttgctatggaagacacaaaaacccgtgagcccatcttactggaatgcaaacgccctgagagcctggcacgtaatagctgctcagcagggggcagtgtgacacagtcattaagaacttgaagatgctgctccctctgggcctcctcttcctcatctgtaacatgggagaatcagtcttttcatacagagtcctgtaccgtttaaattagataatagattcctaaccatgggacagagtaaatattcaacaaatagtaacttttgtcatttctactttttaaattcccgttacaaaatatctccctccaagttagaatgctcattcaaatttcataactgtgtatctttgtctgggaggtcagggaacgcctccaactcaaaatatctaaaaactaactcatggccaccctgacctccctgcctggtgtttgttcagagatccctgtttcagagaacaacatccagttgttttataaacggtttgtcatccttaacacctccctctcccctactcctgccatgctaatgtgagttcttttgatttaatcacttaactccctcttggaactccccatttcttcccattgccccatcacctccacagtgtaagcagcccgtctctaccattgaagactgcagtgcagtcctaactggcctgttcctcacatcctctcttgccctcctccaatctgtttccacatggcagaaagaccactcgtgcaggaacagaaatctggccctgctgcctctgcttcaaaacctgcatcacttccccggattcttaaaatgaagaccaacatacttccacaatcactccagcttcagctggagtcaagcccctcctccccctcctttcttctctggactccactcacaccagatttgtttcagttcctcaaaagagcatggattcccctggtcacaggacctcagtgccagctgggcttccattccctgtcacacccttgaatctggctaaccctatgtacccctcagttttgttgcttcttcagaaaaacctttctgagtagaaccatctcccttttaatatgtcctcacagtacttgtacctctctctctcttttttttctttttcttttccttattaaattttattttaagttgtggggtacatgtgaagggtgtgcaggtttgttacataagtaagtgtgtgacatggtgatttgctgcacctatcaacctaccacctagttattaagcccagcatgcatgagtgtacctctcttttagaagtgtttatcactgttaatatgtaacatatattttggtagttatttgattcatatatgtttccccatcaaggtataagcttcatagggccagaggtgagaggtggggacagaactcatagttgttcacctttggatcaacattttccagtgtaataatagatgctcaatgtgtgtgtatttgtgtgtgtgtgtgtgtgtgtgtgtgtatgtgtaaggataacagctctcttttgtaccccaggactcacccaaggttttcttactttttgtttgttttgttctgttttttcgagatgggatatcactctgtcaccctgcctggagtgcagtggtgtgatctcggctcactgcaacctctacctcccaggctcaagctatccttcacctcaacctccttagtagctgcgactataggtgtgcgccacctctcctggctgatacgtttgtattttggggaaagatgggttttgccatgttgccaaggctggtctcaaactcctgagttccagtgatctgcctgccttggcctccccaagtgctgggattacaagcatgagccacagcacctggccttcatcaaaggctttaattcactgactccctccatctgtagtttagctatgtaaaaccctgtgaaatcaaggatttcaatatgtatgtaatgacaatgtaaagccaaatgataattggaagaaactattctctgactttgttttggggtccttttgttcagcaaaggcctttagcacatgctgtctagggcccaacttctctctatttcaaactgaattcagactccataccacctaaaaatcatagactcctggagtggaaaatcagaggtaggaaataattagtgagagaaactgtattagtcaataactttctctctctctgtgactgaagtaggaaacagacctgaggcttcctttaaaccaagtatcaggtgctgagttccagcaaggaccagaaaccaggtagaaaccccaagtcagaaaataactcaaagaaggcatttatatactttctgagacagtggtatagggtgcacaagagagggagaaaagctgataatttagagggctttgattcaaagggttgcttaagagtattatgtaagcgtcaacccagctgcctaggtggcaggctgaaggtcgtttctggaaagttttacaaactttgggaatgaattcctcttgatactgataaggaacaacactccctaaagtgaatgtgcaaaaagatcacctgggatattgctaatattcactttctgatttggtgggcctgaggtaagtctagtgatgctgtcattctaataagttaacaggtgatgtcaatgctgctggtttgagtggcaggtatgtagtacccttctgctcatcacttgtagtacccaagtactcatccaggacaatgattccagggctgatataaaccatggcccaggttggcaagtttgctttcatccctcctaagtgctctgccactggggtcccatgtctgctcccatggtctgtaaatgcaaatcattttcaattatcagaaaagcaaagtggatcaccatcagcctgaaatatactcaggttaggtaaagatctcttgatagattcttgtgtccaggactgtgggttacacctataattgaggcagtgcttagcaccctttgatacctactgacaggctgaggcaaaagtgattgaaagagatggggtgaggatggaagctgcatagtaaagtcaggtactcagtattaatacctaatgagtactctgttatccacgtgtgctatttcatttaagtatcatagcagtttaatgagaaaggaactttccatttcactcccattttatggttatggaaaccaaggcctgaagagattaagaaccctgccctaatttgtgccgctggcagttgagggagcccagattctgatccataaaggctcatttgaagtctgttgttcttacctggctgcacattagaattccctgaggagctttcggaaaatatccatttctgaaccctcaagaattcctatttcactgctattttaaaaaaaccagtccaatgaatttaacatatatctgagttgagtacaatttcctaggctctgactcttaattaccagaatttataccctccagagactaagttagacattaaaacaaagaaaaaaaataggaatgcttggtggggtattttgcggaggctgaattttagagctacccaatgcaataagactaagccatcgcccactgaccactaatcttacaatagcaggacaatgtccagattctatttgctgggattctacgtgataatagctatgtataccatatgtcaggtgacacggttctaaacactttacatacactgcctcctataatctttcaaaaatacaccgaaatagatatcactaacattccccattgtacagatgagaagactgagattctgaaaggttaaatgccttgccttattacaggtggtgttaggattcaaactcaagtactttggctctagtccatgggataaacaactttgcccactgtctgtcactttatgggccacgcttgtttctcaccagctccgatgatgtagatcttcaccaccatatgtgaagtgagaacaaaaaagggctgaaagagattaattttactgaaaaatgcagtcgatattagagaatgaggctcagtgcgtaaatgtttaggaaacactaatttccatttaaaatcaggagccagtttttatctggcaaagcccttcagcaaagaaaaagttactctgggcaggaatgagtcccttcatcgctgatacgtcagatatttcctggatacctacatggcagggatgttgttgcagggggttggagatggaatggggtgggtggcctgcatgctgtctgaggtctcccttaggcatgagttgctgtgatcctgtgatctgacttaagtcctccaacactcaatcagtaagcgagggcttgatcatttacagttacacagtgagatgtttccaggaatgatttccctgtagcattttaataagtactctataaataataatttattgaagttgcctactatataagaaaaagaatatattaaagaagccgagctaattgaagctggcagttaagttccctgaatcgaaaccaatcggtttatctacatgactctaaagatttgggatgaaaattgctcattatagtctaacatcctgatacccaaagatccagttgtttcacaatatattgacatggccttccaggaaacctatgtgcaatattgagcttaaaatgttccgatacaattaaaaataaattggatcagaaagagcctttactcttctttagttgggagatgaagggatttgaaagatactgaaagctgtgcgaccccagtcagcaagattgctggttctaacttggatgaccacacagcttaagttgccagtgactgtccagtttatacctttggtcccaggataatgtttaacagggcatccattccctccccaagtatcttggtttgaacaatcattgcataatcactatgatcatcctggttaacccacagtgagagagattggagagggcacaatctaatgaggtaaaaacaggccctgaggaagaccaagcttcaggtggtaagagagaatacaaaccaagaggcagaattggggtccaaggaggagcattgtctcatgattcctcaaacatcttttattttgtgtgagtctataatttcatatagtttgttcctccctcagctcaacttttgcacgtatgtatgtgcatgtgaaaaatcaaaaacccatgatcattcttttcctctttaatgtttttttctcctgattgcattattatagggttgttgaggacaaagacagtagagtcagacatgtgaggtgcaaaaatcctctgaggattttgcattatctggcttgacagttcagagactgtctctgaactgtcaagccaggataacaactaacatttttgagccctaagtcaatcacaagtattatttttaatattcatgtaacccctatggggtacgtattaccatgatccccctttcacacttgaatgacacttgaagagattaagcaacttgtccaggattccacatggagcagatgacagcatcaagatttgaaacgagaagcctgaccaatgctccttctggccagtagtcttttcttagcagaccattatgcacagttcattggtaaatatttccttagttgcatgggggtaggagaagtgataggagatatcccctctgtcatgcagcccagtctcatgacatgaggcaagatatggaagtggtctctggagaggtgggcccactcaaggaaatcatcaaagacttctgagagaatgtattggcaggggggtggggttgtggagtggctcttaggggttggttttgtgggataggaaaatgtttacaagacagaaattagaagaggactatacctagcagtaggaatggcctgaagaatgactttggtctgaggaataaatggtgagtctaggttttcacataatccatttgggctggactgttgtaaagttcaaatgtatgaatatgacttatatggactcctaccatggcctctgctcccttcttcccatcacacaattctatcacttttgctttactctttagccacagctttttatagtacctctattcttccatgctgtttcaactcaatgacactttattagtccattttatgttgctataaaggaatacctgaggctgggtaatttactaaaaaagagatttatttggctcatgattctgcagctctagaagaagcatggcactagaatttgcttctggtgaggtcttcagggagtttccaatcacggtggaagaggaaggggagtcagcgtgtcacacagtgagagagaaggaaagagaggaggaggggtgccacactcttttaaaaagtcaagagctcatcattacctcagaggagggcaccaagccattcatgagggatccacccacattatccaaacacctcccactaggccccacctccaacactggggattatatttgaacatgagatttggaggggacaaatgtctaaactatatcagataccattaataattttccttcatactcaaatacccttttccttgatgctttcttcatctggttcattgttgttttccttctaatttgcttctcccagaaagcctactttgctattctgggcaggtgatctctaccatacagttcaatagcaccctagtatgtattcactgctgtgcacagtgcttggcactgtgtaggaactcagttagacaaaataaggccaggcacggtggttcacacctgtaattccagaactttgggaggcagaggcaggtggatcacttgaggccaggagttcgagaccagcctggccaacttggtgaaaccgtgtctctactaaaaatataagaattagctggccattgtggtgcatgcctgtaatcccagctactcaggtggctgaggaatgagaatgacttgaaccctagaggaagaggtttcagtaagctgagattgcaccactgcatccagcctgggtgacagcatgagactctgtctcaaaaaaataaaaataaaaccagctgaaaagaactggatagattagatagaagaagctttgaagcagaggtcaagttcaaagactgtttctacaatgatcctagtaagaaccagggtatgtctgtaaacatacatgagggatatgaggaagaaagattgctgagagataattctggcatgtggacaggaatttcagacaccaaaaagatgggagggccttggattccacataatctaagaaatacgccctctgtagtcctcaaacatgttttgcaagtgtttggccattttttcataagggagtttttctagtaattggaaaatctatatgaggaattgcttccagttattcagcaagtcatttgctcaacaaatgaacacatgcaatgtactgtgtactgttgacagtacagcacaaggatccagggatgactaaggctcctcccctaccatagaaaatcccagagaccagtagaggagacaagtgcttgaaacaaatgacaaaagctactgtgttaagtagtgaatctcctcttttcctcaggcccactttggcctctgacagcacagggttgatgagtcagcctcttttcatgtgaaaacatctgtctggtccccccaaagacttctctaaacattcttctgatatgaggtaattatttcatatttgctgcatttgttgtgaacactgataatctcatgaagatctattaaatgtcaacgtgttcctttctgatctacttaactagttgatgccatctttagatgtatgtattgtagtagtagttacggaagggacttgtaataaacagatgcaatgataaattcagtaaaaacatagagaatcatttatgtttctcaattataagttaaaaggcaaagccttggtaactggattttcttccatttggggaaagtgtgatgtaataatccttcatttttaagaaataaagagaaatgggtggtttgttcagttcttgatataaagaagtcaactttaaagcaacattttattagaaccataagttttgtttgaaaaaatttaaaatccagagtttattttcctttggagttgctgcagagagtcaacaggaatcgagataattttttttcttgtatttgtgctcacttattaaacacatatgtgagctagattccttgcataggtgcaaaaggatttggaagaggggggaaggtgcaatttagttcattgacctgcttccctgccctcaggagtctttcaaacagctgtgagaaagaggaagaggggaaaggagtaattttgcactcatatccagatgttcatttcaaacgcatcctgaacaacttttgcatggtttattacattttctgaaaccatttttcacaagcctgttttctcagctgggaaacttctggtgtagaattttcaaaaaaatattgcatttggcattataagaaaaaaagagcttttgagacattcaaagaacaatctgttggccttggtctgcagaagcaggacttcaggaatgtaggcattttgtaccacccaaaatataggtagacgaaagatctattcttaacatttgctttacatggaagcttgagagatcctttagcttgatgatttcaatgatgtgctatcttaggttggcctgaaatatcacagaaaagaaacctagctggggacaaacaggaccagtggaagaatccatctgaacccaaaccaaaccagaagcttccacatggcacttcaaacacagtagttcagttttgcagaactctgtactattctagtcccacccatcttctgaggtaaagtgggaaagagtggaagaaaaatagttatgaatgctaattaatttcttagaagcctataggatgcccttcccatggttggtcccatccattccccttaagatccaggacctgacaacagaggaattgaggatctagaacagcccctagtcccaccgcagagtggacttggtctcctggccaattgcaggcaatgaaactcttccttcttcatcctttctacatgtggaatcaaacctagaaatacccttaggaaggagtggatgacccagaaagatgagtccaaatggaaagactaagatctgctcttaaagaaaggaaatcaagctgcagaggtcaaggaaatcaggagaaatgataaagcaaagttttaatgtggaagaaatagaagatcaggggttttagaacccaaaccaagtcttggatacgtttcttaaccttcctgacgttcagtttgtccacttttagaattgagcacgcacctacgtctttataccagagggtgtcaaaatgagaatggagtggtgtgatgtatgaatataccatagcataccataggtcctcaatattgtttagttcttcacacctattccccaacttagagaggtagcacaataacgctagacatccgtatttctgtaaatatttctgtcgaagttctgtgtgtgtctctgagatattaaagatattatccagtaggcagttggttatactaatggtgcagtcaagagagaatctgatttgaggatagagatccaatagacacaagcacaggggtgatggccgcacacatgagcatctatgagggcacccaagagactaaagggagtgagaggtaacaaggacataaaacagagttcccaggacaccagccttggagggacaatccacataagagaaccctgcaaaaacaaaggaaaagaacactgaacaaaaacaattaaagtagaaattaataagaacaaggccaagaatgcttctaaaagaaatgagagggaggattttctaaattttaaaataaatataacccaaaatgtaaaatactgtgggaaacaataacagttgtccaagaccacatattgcactatgaaatactgggaagtgaaaaaagaagtaaaaaaataaataaataaaatgtgctaagtttctcaactaaaataggactgagtcaaaagctattgtttctttttgaccttgataattagagaaatattggatcaagtacattattttgcaaaatttagtagaaataaaaaacaggatgattcctcccaaattactgcaggagattaaagaaatcaaagcagagttcatctagctaatgacaggaaataggggaaatggtaggaaagcataaaatccagaaaacataaaataagatcatagaaggaagtgcaaatgtgtctcttatgacattaaatgtaaattataatgccaccctttaatatttaggaaccatcagttcaggttaaaaacaaagatgcacctcttcaaaggaacaatttttaaaaagtgtctcagaaagtttaaacataatatatctggaaaatatgcatcaggaaaatgtaaataagaacaacggatgtgtcagtgttaatatcacatagagtagaatcttgggttgaaaaaaaaagatacaaaacagtacaagagttcatttatttgtagttatatattctattatggataaataactatgatatagtttgctgtttttaataacagataattaaatagatatataaattaatcttttggaaattcaaaggaaaatgtttgggatatgtacacacatatgactctcaactacatagtaaatagacaaaaataaataataatagatgaagttttcttaagatgataagaatataccaaacatgtattatacctagaaaatgagtactcatctggccagctatgtttcagatttttttttcctctgtaaattgcagggaactcttcccaggagcaacctcatttgctgggagatgtggtttccataaggatatgaaactatttcagtatcctgtcctgccatatggtcacacttatctggtgacattctggactcagcacaatagatgtgccctcacatgcaagtatacagccttttctagaaaaattttaaattcattttctatgaataatgtcaagctcttgagagactcatgaattctctaggttctcattttacaagtcaactcttggaaatattagtttaatctactttactgaaaactctaggaaaactgctcttcaattctcttttctagtgaacagcattccagtcttaatccttacagactttcggaggaactccctcacatcacccacagtagaaataacatgagaaagcacacagtcatctcttgcatccatgtcctatccatgcttttgcattgctgacaagtgacgggtgggctctgacatcaggagatgcaaatggctgatgattcagacggttgtttggtaagtaaacctgggtaaaccctcaaaatgcaatgtttattttttctcctgaccacaataatctgaaaataccctcaaattgtaagaatcattataaaacagcctttttctggctcactacccacataccagaattgggataactctactgaaaacttgcctaccctgataggaatggaatatttctgacaagcttacacatgttcacctctttctagcatcaccttcattgctatcatgtctactataattatcatgcattggcagccatgaggaatattttgcatatattatataaattaatctcccaataacattcaaggcagatactatgaaaatttccacttcactgatgaataaactgcccactgccacagagtaagtacacagcatagtccttattttaaaaacttttcatcacagaaaacatcttctcctcctttctccagtgaccctctgtgtgaactcctactcaatttctagctacgtgggttccctggtcatttcagggatgtttccttctgaaatagcttccgggtttataggttctccttatctctgttcttcagtgtcttcaagtggttatataactaatgagggaactcaccccaaatgcccttgtcacatgctattgggaaacatacttaaagcagggatgtccagtgttgtccttgattacagagattgatgggaatttgtttcacaagaagttgttttcttacagtatattgttaaaagctcccagggccaggagtggcaaaaatgccatttaaatgactcgccatgcttgttttattcaaaatggctacccctttatccagaaaatcactttttttggatcaaacatcattcttcagctcccttccattctttcacttattcagtcatttatttctaacatacttattgtgtgtattctatgagtcaggacctcttctgggtgttgggtgaacaccaccacattatactaattagtgtctacactaacaaagtagacatcactgaagacctcagtgaatttggtatttagtaaggaaccaacagacaagtttaaacctgaaacagaataagatagttgctctaacagggctatgggccagataggggagagaatcatcagataggttggaaacccacccatgaggctccttggctcacgtcctgcctgcctggctgaccctccaggcattcccggacatgtctgaatattcaggatgtacacattttgggctcccattttaggaccctgttggacttggaacattgccagtctcctcttggttggcactgtggtctaaaagagggtagaaagagagtaagttctacatgtggcagaatagaggtttcatcctcatcccctttccctgcttcctggacacagtggttacttatttaccccttatcttttggagctgggatcaatgctaagctagaattagagaacagtatcactggaaaaacaaaacaaaacaaaaaaaaaaaacaggaaaaaagaaggctgcaacgctgttagaataaaatacagggaaagtatagtctaggaagaggcaagtgttagctggtaaacgattttttagtctgttgagatatgtcagcgtgagattagtgaagaaagtgcattttccttcaccaccttctcttaactattggaccagggtgacttaaatcttctaagtgccttacctggcctctagtcttcctgatgcaatagtccttagaatggaaaatggtgataacaatagctattttttaattttatgctttattaagcacttattacgctccagactatactaagcattttgcctgtattatttcattatagcctcaaaatcacactgtggagaaggtactattagcatccccattttatagggcagtggagacatagaaaagaaaagcaacttgcccaaggcccaatgtgagtaaaaggtgaaatgagaattttattccaggcacttggaatctagagctccacactccactgaacgaatgtattctgtattctcgattatctcattttacttttaaatttctggtaataaactatactatagttttatgctcctgtaaggtatcaactaaagtgttaaatagaagcaaggtatcaagattgaggccttccatcatgagacattattgaaggtgcatcttcaaaagtttttgctttggggaaaactttagtaattacagtacaagacaaataatttaaaaccccaaaagctgtggatatgtaagtgttgagctttatttcttgtatttaggatggagcttcattccagtgtgagaatttatgccttggtgcgctgaccactccataaatctaaataaagcctcacaatgttccatgtactatgacaggtgggggatgcagagaatagtgagtaggagcataaaatctggagcagaaatggctgcatctgaatcctggtactactactgggtaagactgggaaacacactttcatgttccttgctgtcaaatggaggtaagatggcacttgtagggttgtagtgaaggagaattaagaacaatgttatcttccacaattattagacatagtttaattaccaggacatagtgcctgctattaaactggacatgaatgtgaacaggtggatacccagatataggtgtgaaaagagaacagggctttgacacagccagtggccagatttaaggaaaggtgtcagagacagtggggtgtaaagctgaattctcaaagatccacaggtgtgtccctgattagcaaggcaaaaggaggcattgctggtgaagggaacagccatgaaaatggaaatggcaagagtgaggccaagcagtcagtcttagggaactgcaaattaagaactatgcctggatttaggattctaatgggggcattgttagagtttgagtctagagagaaaggaaagcatttagatctcattaaggagttcagactttatgctatgggcgataggaatccatggaaaatccttgtttcatttgtttctgttttttgttcacttcttcttcttttttttttttgacagaatctcgttcctttgcccaggctggagttcagtggtgctatcttggctcagtgcaacctctgcctcccaggttcaagtgatactcctgcctcagcctcttgagtagctaagactacaggtgcacgctaccacacctggctaatttttgtattttcagtagagatggggtttcaccatgttggccaggttgatctcgaacttctgacctcaagcgatacacctgcctcatcctcccaaagtgctgggattacaggtgtcagtcaccatgccaggcctcacttcattgttttttaacttttatttttttaaatcaaaaagagcttttgaaaatttccttccaagtagtgaaatattgtgtaaacattaacttatggacaaattgcaagtcatattttaaaattacctaaaatcccacaacccagaggaaacacgcactgacattttcctgaacatcttagaacacacatatatgattttagtgaactgattaataatattttataaaatgcttattaataatatcctatggaaacctttccatatcaataaataaaggcctatattagcattttaatgactgtagagttctctcttttatggaggtaaagcagtttatttacccgatctttactgatttgaaaaaaaaaagtttaatttctgagcagtaagcagtgcttcaataaacaactgagaacacaatgcaataaaaccataaaataatggatggaatagataatatagcaaatagtttgttgaaaattaaaaaacaaacaaacaaaactcacttctttaacctgctgttgaatgagaagagaaaagaacatggccagtaccttagtagaggtttatttattcaaaaattcagtacctcatctcttatttattgagcatcaaagatgtgcctgaccctgttctgataatggggtgcaatggtaaacaagtcagagaagatacatttcttacagcttacattttagcacagggggcagatgataaactaataaagatgcaagaacatattaggtagccatgagcactgtggagagaattaacacagggtagtacaacagactagaggatcacatttgttgggtcacctgaaaagacttctcttaggaactgctattaaggctgacaaatgaatgaccaaagaatccaggcaggtgaagatcagggaaaagtgatcttttctattcagggaagaagaagcagctactgcccaaagtgaaggatgtacttagcaggttcaagaaagagaaaaacaggggtccactagtgtagcttgcaaatattcaccaacaggaaaggtggcatgaggcacagggaaggtcagggagcatcctgtgggccaggcaggtgttcagatgtttctcttacttacaatgggaggccactagagagttttcaccagggcagcaactttatctaagattttagaagttcaattcagcctccagaaaccacagattcctaagggtaagttgctgttttgtttagctctgcattcataagacctagaaaagtacctggcacatagtagatattacttcagtgttaaaaagaatgagcagccgttaggtagggagtccaacacagaggaaatgaaagtggaagcagggattcattcattgatccaacaataattacgaaatatttaaaggcattgtactaagtattgtgggtcaatgataaatgaaacttagtccttgccctcagagagcttatattctagttggtgaaaaggacctgaactgaatacatgggtgattatttatttctattgtaagtgagaacaatatttcattccaagaaagggcatgtcttattttgatactccagactgttatctatttgctttaaattaatttaatttaatttaatttaattatttttttgagacagagcctctcactctgtcgcccaggctgcagtgcagtggtgcgctcttggctcactgtaacctccacctcctgggttcaagtgattctcccgcctcagcctcctgagtaattgggattacaggcgcttgccaccatgcccatctaatgttttatatttttagtggagatggggtttcaccatgttggccaggctggtctcaaattcctgacctcaagtgacccaccagcctcagcttcccaaagtgctgggattacaggcataagccaccatgctcaggctatttgctatttgattgaggacaggccacagctgtagcctctgtttagcttttcaaggagaaaatcaggtcttccactgaccagaacatctagaaggaaaggaatatttaggagaaaagattatcagccaagattgggatatgttggcttcttggcacctttggccccatgggtgcagatgagcagtggaagctggaccttgcagtgtggagctcaggcaagagagctggagatgggaacatagccatatgggggccaagtatagacaagggaaaatgcagtggtgtaaagtaattttcattattttccttctatggcctagttagattaattgctccttcaacagttcctacagagacctacgatagcatttaaagagcaggttctctggacttgggctgcaatggtgagcaccagagcattgtcacttacaatagaatatttatgagcaagttgcccagccccttggggtttagtctcctcatcagcagaatgtgaataacaatagcacctactctatacaattgattacattctctaatatatttacagccctgagtaatattgaagccttaataaatatctaatatctttattacattcagttgtaattattttattataaggctgtaatggcctactctagaccatcatacattgtgatcacttatgtattatcgatggcaatcatagtattttgtaaaaagtctgcttgataaatattctttgaattaatatttttaaaacacctttttggagatatgattgcacatacaaagagccgtgcatatttaatgtatgctacttgatgattctggacataagcatacattcctgaaaccattaccgcaacgtatgccatgaacatatccatcacccgcaaaagtttcttcctggagtcccaacttatctaaagtatagggaagccagggaaccccttaataactgaggatatcatgtacaagaaagggcataaaaatacgggtggcatgcactcctatcattaaagtcaggatccaatatatccttttaacaggagggttcaggtcaagttttggcagagtcaagtatcatctgtggattcagggctgggtgaatttccaatgccaagtgtttagaagtgaagctcctgcaccacctgtatcacagtcccgtgggtcagatgatgctgtctggagttcagaatcctcagtttcactcctgatttactgattcacaacttattgatagggggtgaggaagagaacagcctgcctagaactaccttaacagtggctccctgtatgtgccataaaattctaaaaatggaggaaatcaaagagatttaaaaaagcatatttgaatacttgctgatggaaattatttctggaggtcacgacataggctgggactgtgagatcctggaatcggtgtttgtcttcgtgtagcagtgtttcttttttgagaggacatgggaagtaggaagcagacaatgtctcttggtggcagtccgagttggcagggagccccttcttctgggcaaaatttctttggggcctacagagccctctttcagtcttgaacaactcacccgtgagatgggtcctgtccgctatcccgtgagagacagcctgtgattgttgttggtctgtgccagttgcagggggtataatttagttggatttcaaaagaagaatttcttttttcttttctatttttttttatgtctttctctcatatcctaatggagtttctgccaaggcaaactggtacaaaccggcgccatcaggaaagcaggagatggagcccagttctctcgaacacttcatacccaagtgtattctcactctaaatctgtatccaacacttagtcaagcttggattcctataaaagccttgtaaaaaggaagtatggatcaaagacaccttcaacatgtatcatgttgtgttcaaaacctgtgtgggagaagcaagttgtaagcactagcttctggtcagcacttcccctgagtctccccatgcagggccctgctgggggccttctaccaagacatgtcctctgagggcctctgccaccgtctcagccttatgtttccctgggaaaaagggcaggagcagccccagcagaggcccttttccctggcagcactctgtgtcagcaaagcgtctccagcaagtatttccgtgggaaggtcttccatctggagcttggcagacagaggaagtttcctttgaggttctgccaccctctcccctcagctctgcataaggtgcagcccagagaggcccagactgattttaggaagggtgcgagtgtgtttcatggagtcagaactgctgtccctcttttcctcagtaagtgggcagggcgctgagaagaagaatgttgtttgttctgccactacctcccatctcagtgtgcaacaggtcacaagatgtgacaagttcatgtgctaattccttccttttcagttaatagaataacacagatgggaacacttagcctgggatcggacacaaattggagcagccgtggaaggaagatagaggtagcctggcccattctcagcacttcattaaacagaaatgacttctaacagcattgttaccctcagctgggtatccctgagaagctactctgacaggaaggtataggcctctggcataggccctagcctcaatccactcatcccacaaaatgctcacaacatattaaaaaagtaataacactagacagcaatttcactgcttcccagagtcgctgagcagcaacgccctgacattagctctaaacctactccatagcttgtctgcaagacgataaacagaatactaaggagaataggggagaggagtgttgagacagaaatcgtagagccaagcacagacaccacggggactcctgtcatccaccttggccactgtgcatcttgaatgttcaggtatagaactggtttcaaatattttaccccttaccagattatgttctagcttttctcaaaggtgacagcaaacctttggtgatcaaatggctttggaatcaaagagacatctttaaatcccaggctgctattatgatgagctatgagtgagtacattatccagctcttcctaagactctagtttcttacctgtaaaataaattaggacaatactttcctcttatttagttgttgaggatcaaataaaatgtctagagcagtgactaagaccaaaaaatagtagctacaatgtattgatgtgtatgatatgtgccaggcattgcacctaacactttataggcatattcctaatttaactttgctaaagtgctctgaggcaatgctattataacctccccctccatgttacaaatgaggaaagagtgcagtgataagatcccacaacttgcaagttgcgggggaagggtcttgaattgaagccaggtctgtctatctgtgactttagagcctgagttcataaacacatagtaggtgctcagtaaatggtatctgtaatcattttcaacattttcaccactacattacccaaatcatgagagacctccatgccttgctaggcagtttgtgtatcagcattgtagcgttggctataagaagatggtagtaaaataggagatgatagacaacaattcctaatttggaaattgttttggaaatttaaaaagaggatgacagatgcatctcagaatttagatgaggttaggtccaaaaagtatctttgtgaatatgtgtaaattaatgcctgctttgaaccccttcctcttttttatgaaaacaggataacagcctctcctccctcttgagaacttagcctttctctattccatgtggctttgatgagaataattcacatttttcccttggcaccaggttacaagtgtgggccacctgtcatgaaccttgtctatagagatcagtacataacctgagcctatgacccaaaagggccaattgagatcattcaagaagatatcatatgttgataatagaagggttcattcagtcaactctgtctcctgtcactgtaaggctgaaataacataagttgagcttttggtagccacttctgcttctctcttttcaaataaatggaggtattttgcagtcggaaggaattcaacaaatatagggaaagccaagaaatgcagagagaagtagaggaggaagaagaggaggaggaagaggaggaaaaagaagggaaaagagaaagaaggaaaaagaaaaaagggagggtgagaaagccattattttctatctcaggatcgccttgtgtttaagatcagttctatttctagatttccatgttgtgttttcataattttacagaaaaactactagtttgcataggatacattggatttgtaagcaaagaactaataacgagcttggtaagaggagttttaatagcctcggtatgaccaaaattttgggttatcttagactttctcagtccccattcccagaacatttgactctgtctttaccagggacatctagtagcatatcccaattatgtttcaattggctctttatttcagttgcatggtgtgatggaaggagaatggtctttgaaagcagacagacataatttcaaataccagcttttccagaatgtaactctatggatcttggacaaattatttaagttctctgagtctccatttatcatctctaaattggatgtgggtacttgggtgtgagaacaggtagatgggcaaatcaaatgacttagggttaaaaaaaagtccctggcatggtgcctagcccctaaagtgtactctgaaaaatgtgtgttgtattctatccagctcaactccactctttccgtgtgaagattacatagtaattgagaataggtatgttaaatctttttgtgatccttaggacctttctgtaatacagaataatgatgttgctctgtatagcatatggccatgccatgtaaaatgttgacaaactcagcctcaacttttagaataagttgcacaaattaacaaaatatgtgaagtcttgaatttgtttgctaaaggagcaattatatttcatacataactgacacttcactactttctgtcttgtagtaacagcttctagtaactcacagctctcactgtccctattcctggggtgagggaggtgatgatatcatatattttctgatctcaggatacatctagccatgaggataccagggcaggtcccaagacactttactggtaacagttcctccttagccctgctagctttctttaaaaaaggaatcagtatgttacttttctggatttttagggaatcttatagttgaagttggttttgtgccatttttactttcatatcctctatagcagtctctctgtctctgtctctgtctctctctctctctctctctccccctcccaccactgccttgccccgattctagacaatgggaacaagattgaataagatacaatctcccaccccaaagagccagtagtccctttgatgacacagactgagagcagtttatgatctctacttctttagcttgcagccaaggaggtggagccgagacccatggctgagtgcaggactggttcctcagccctggagaggtgacattaaagggtgtctttgcctcacatggtgcccagatgcctccctttgtaccccataagctggttaagagagaattatctttctataaaagcagagagacttaatgcctggcagaccctgaatgtaaatttcaaacgatgtgatttaagtaaaacttatttaaagtgaaagttgtggtcacactgaagacacagcccatctttgttttttgccttatacaagtttatgtggaattcctttctttcccattctttatacccattgggtataggtattctcttggctgactcagaacatttatggagaaaatcagaaacagggcttcatctcttctcctaaaaatagtttctctttttcaaataaacctgctggtaaagtgtttacaagtataatatttcacacaaggaggaaaggatcatattaactgcaagagagaggaatctggcacctaattcaagaaacatccttcatacttcttgggattggaaatacaaaatccatgagcctagaaaagggagggattgagtagaacacaggaatctaaggaaaattatagcaagaaagggcttggatcaacccttatctgagtcccagtattttgaggagtgtgtttatccatgacttgccattttgaatccaaaggtagttttgtagtttttcctttttctccacctagggaaataaattgatgctcatttagcatatactatgttttgaaagaaaggaaaaagagagagagaatattaatttgtgtagcacctcatgtgagtttctacagctcaaatttccttggcaaatttattgtggagtttccacctatataaaggaattttccttactaagcatttcccagatctttttcagtctctgttttcttaatttcctaattttaaaaattgtccaccagggaccaggactgagaggacaaaatcaacagaatgaggccatgtgggatttggttgccaagactcaagagggtcttgctcttgttggagcctcaagtccaacaacggtcttggtaacaaaacacaaacagttcccttgacacttattggaagggggagagtggggtgtgggagcaattggcttgccttctaaaatgactgaaagcaaaatttgagtgaagccaattaaatccatgagtataaagtaatttttgcaagaccttcccagcagagagaagcagtcatattgaagatcaatcacagaaaaccagaagcattttgaagtggactcattaaatctaacaaggggttttgggatctgggacggaagaggacagcaaaagtcttttaaatgtaatgtttgtcctggtgagtctggaggctatgagagctcctgtccttatacacttgtgaactagttcaaaaggctaggtgaggaagcaggaccaaggctgcgccatgccctgggagagaagaggaggcagaatgtaaggaccgtggggccaaagtgggctctgttgcaggctctgaggaaggagaggcaatattcaattcagaggcatgatgaggcttgtgcaagcctggccactaaccaagagccaagatgagctgggaggagggaagtccaattgaccagcccatttgaccttgggtatgtgggaggaagacaacaggaacaccaactgctactgggtcaagtaccctctgaactgagacagcgaaaacaggaacaaggccagcagaggcttctaaagggaagcaactgaatctggaactgtgattagtcatggtatagagaacacgttcactgattcatgagcatgtattgattgcctactgcattctaggctctgttctagggacacaatgccacaagacagtcaagagggggagagacaagctaagcaacagccccaaaataatgtcataagtagcatgaaagagaagtgtagaggaaactaagaatatgcctaattagtcttattagtagagaaggcctccttcctccccattgacactaccctcatttagacggctgtcatttttcacctaaacattgcaactgttctacactgatctcttcacatcttctcatgcacctttccaacacagctgatcatgttacatgcctacctacctaaagccctttaatacatcccactacaaggcagatgcaatcaacattctttaatatgaccagcatggctctgctgtatctgtcttgtctctttctccaacttattttcctctactccgtcatgctctctgaaatgaggagatgctaaggaaaagacatccaggcaaagatgtgcagaaaagtaacaatatacaagagaaaacttagggagtagacaaaaaaaaagttctctctaaaatccactttctttcatactctgagaaggtttggtagacagaattctaagatgttcccacctcaagatttcctacccctggtatacacacacctactccaagttattaaagcaaacactaatctagctgcttctgtgaaagaattgtgcaaatggagtcaaggtcccaaatcagttgataggaaagttatcccagtgaccctgacctaatcacaggagcctgatataagcagagcgtttcatccagcatcacggaagttggagattcaaagcacaagaaagactgaaggcactgttgctggcttgaagatggagggaacacatgacaagaaatgcaggcagcctctaagagctcagaatggcccctggctgacagccagtgaggaaacaggggtttcagttcagcaaccacaaaggaatgaattttgccaacaactggtgaacttggaagaggatcccaagccccaaacaagaactccagcccctgccttgttgacaccttgatttttgctgggtgaaattctgagcagagaatttagttatgctgggcccagacttctgacttacataaactgtgagataatacacttgtatcatttttaagctggtaaatttgtagttacacagaaatagaaaactaatacttgaagcaaaagaaaattcagctttccaaaacatttaggcatataggacttaagtaagtgtcctcctcatcattgaccgatgccccattctgagatttttaatccagacagttgcccaaagcatgaagaggggatgtatatcacgtgtgtctttagaaacagggcagggagtagttctactcttaactgcaactcacagttgaaagtccgatttcttgtaatattgatatctgtgttctttctggaatggaaggggtcgcagatatttagattatttttgtgaccaactaagagtgggtaaaaggtgaaaatgggctgaaagctggtattagagacatgggtactacttacctgtagaataagcaaataactgccttaataagtaaacaaataacttctaagtttaatccccaaaccacaattctataagttggcatacaccaaagtattgaaagttgatttggaagtattgacatagaccaaagcccaaagtgcttgtagaatttgaggggagaaccagagtggcatctcttggcagatagcatggaagggagacctacattccccattagaaaggaactgggctaatgttgacatctgacctgtagcaatgttctcctaatacacgtagcccaagaaaagaaagctctttgtcaactgagagttgctggccacttgcctaatcaccagccttgcttgctttagagaaatttattaccataaaaaagggacaaactgtaaaactcagacttcagtgttgaaaaattgttaggcctttggcccttttctcagcatttgcaaagaatttccttatatacttagtgatggggttagatatatgtaccttggagaggagcacttgtattggagcttttccttttaatttttcttccacttttaatttaggttcaggaggtatatgtgcaggtttgttacatgggtaaattgtgtgctgctgaggcttggtgtatgaatgatcctatcaccaaggtagtgagcataaccttccaactcattccccactttcattttcccccgtcaagcagtctccagtgttcccatctttgggtccctgtgtattcaatgtttagctcccacttataagtgagaaagtgccacatttggttttctttctttcacagcaccattcacaataacaaagacatggatggaattaacccagatgcccatcaatgatggactggataaagaaaatgtggtacatgtacaccatggagatttttcaaaagggaaactgtgttagaactgagccgcctcctagtctttccgaagaatgtatcaagagaacttttgttggtgtcagaaaaggcatgttggtgtcagaaaaggcttcccatgaaggcaatattggggctgggaaaaatgttcatatgtcagacaagagaaagctaggacaatctagtcagaggttgcagaaggtgtaaagatggtggcatgaatgaccgtggaggatccaaaaaactgaaagtcagtttagtatgcttggagtacattatttagtcaatggcagaaagagaagatatacaattggagatgaacttggaaaagtaggtctgactcagagtcaaggtaaccttgatgctttcctgagcaggctgggcattagcctgtaaggaccaaaggatttttgccaatggcatgatgtgattattctcattttggaatgctgtccatgagggtagcagtgtgaagaataaattgagatatctaggatgagatcccatttctggtttggccaatgtcttgaaatgagataaggaattaaattgggagtcgggggggatatatttagtttgcttttggacatgttaaattgtgtttgcctgcattacacaagtgaatatgttgtgtttctgttactcaggacatggtcaataattggaaattcagactggagagctgtcacacttagcaggggcagattcatgagcttgcctagggaagcaggtagcatgattgtttattttttctgtaaatcaggatactcctttagtttattttacatagatcaatcactcttgaatttttgttagggaaggcactcacttatcaatcatcaaaaatttaatgtgatccttccataattggcactgttcagacatcaatggtgttgtagaagacaagatggaaaaaatccctagcctcatagagcttcactccacaaaaagatgaggaagagtaacaaatcatagaataaacaaatgtcagatagtggtaagtgctatatagagaaataaaacaggttaagcagatcaaacattgctatggagataatcgttctattttagatagtttggccctgtaaattgtccctcaggacatgacatttgagcaaagatctgcatgaggcaaggtatgagccagtcaaggtctaaaggaagagaaagcggagtctgaaaggtatgagtcaggaatcagacattcaaggaaatgaaagaaggttaagggcagacagagatatgtgaatgaaaggcagagaagtaggagatgagaatcaggcagacgactgatcataacagaacttggggctagggttagtgagtttgggtgagacagaaaccactgaagggctccaaacaaagcagtgatgtcatctaatgtttatttgaaacaattttattggtatccatggttaatagggagtgtgctaaaagattaaaattattattattactatttacctgttcagtcacccactcatataatctagaaacatattctgaaagcctgctctatgccaaggattgtgatagacattggggacacaaaaactagtaagaggcagtcctttccttcaacattttgcagtattacaactaagtatgcatacatcacacttgacaatggagattcttgcacccacttcccattccatgccgtttaccctatacaccggaggtagaattatttaaacaccaagtagcctggcatatttttagcatcttaggaagaccctcactggatttatatattttattatgtagttattcccacttctcactctcactctccttctaatattcttcatgtatctagtttcatttttataacttctttcaaaatgtgtgttctagttttgcagtgacttttatttctttcaaaatatatgtttcagaccagcagtagagagtgtatgtaattcattagattgtatatgggggccaagagtctacattttaggggaaaaaaaggtccctgggtattgttgatacctaccccagctcggaacttttcaaagcgggaggtactaaagttcattgatgtgtttgtaaacttactcctttgggggaaaaacactctgatttgtagcatttgctgattttcatggtgcgaatatttccaccatgaccaatcttaagctaagaaagatttaacaaccaggctgcaaaaatcctgaatagtgagcaattggctggagccaatttcagcatactgttgttatgtcttcaatcccacctacataagtacctaatgaagacattactctgctcgtaagaataggtcatcttagtacaatgtgtcctaaacaggtaacaggaactttcagtgtacctagataaagtcaggtaggtgttgcagaatccctgataagcccgtctaaaattgagtgacagagctccttttctttcaaggatagtttttaaagtttgttactgggtttctcatgtgcaccatgatagaagccaactgttttgtccttacactctgaacaattcctagacaaattagaaggatgcctcatggccattctattgcctcagaaatgtttgccatccttgggttacattgtttactggagccaggatctgcaggtgagaactgaagagtacagttgggaggacaatggatcttgagaatttagaagatatttggattttagaaagtcttggaagagaggagctgaatcatttctagaagattcaaaggttgcttcttttgagtagtgcaatttccatatgggcttgtgatatcttaaaaatataggtagtcttcctcctttaagactataaatggttaaatgcagttactgagaagtaggcatcatcatcatcatcacagtctaaacatcttacatatttaattgtgaggattacaatagagaatcttgtaatcatcataataacctgataagtttgtcttagtattttctccatattataaattaggaaatcagactcagagaagttaaggaacggatccaaaaccatgcaagatggcaaaatgtagctggggtttgaaaccagactacctgtgcccagagctctcattttccctgctctgtcatactccttcccaatggtcttcatggtgcctgatccatagtgggtgctcccaatatatttatgcaatgaataaaaataaataaatgacagtgtgacttctaagagaaataattaagcttggaatatatagatttttagagtttttaatgtaatgaaaggtcatgtatataaagccacagcaaaatgttctgctatgaaccttgaaaattgagttcttccttggaaataaaaaaaaaaagtgtgagcttaaggtaattgtccttttatactgttgtacttgtcatagtgccagcatctacacttttcctctagagataaaattaaaatgccaaattttcatgattatgagatgattacagaataagtgctgatggaagaatcatgaaacagaaaggagagtctgtatgccttcccaactagttaaggacttttttttttttttttactttgctttgctttcctttctttttttttccctgcaagagatatactacataaggattttcttccatgttcccactgtatggactctttttctctcgattattattcaccctctgattggttgtgacatgtgtctttagacaggaacacttgtgaatgctccagcaccattcaaaaggtagttcatcccagctggactgaaaacactaggaaagtttcacattgaaggactgttgcttttgttgtaataaagaatacatacttttcctactaccaataactcttcccgtgattagaaaggattcttcacaagaaaactttggccaatgtgaaaaatgaggtttccattacatatgtcaatgtaattgtcatgtgaagtttaactgtcccgcttgtttatttgctcattacatctaaagggaaagcaatattgtgggggggacaatcaggtcctgagtgcatcagtttaatccagagagcttatttttgatttaaaataaaaagcttcagaaagagaactgcagacgtagaatccatcctttgctcttttgtttcacatttcagtgggatgcagacagacctgtgaggcatgttgcaaaacaccagcaagagatccaaggctcactcctgaggctgactctgattagacccttgctaaccacagttcaagtagatgaaaagggtgagtgtattctgatggaattctcctttggttttccctctggggctgatgggaggggacaagtccatttgtcctgttttacaagtgcgatgtcttttgctcttaaaaaggaagagcttgccacatgccatataccccactattagtcaagcagtggaaagaactcaatacagactaaaaagtacaatgcccaaagggacaccatcaatcctttattaccacaacttcctcattcttgagttgtttatattgatttatcttttgctcaggtagagtgacttagagtaattttctcagcaagagaacagggatggcctctgttctgagcctttgccagcctgagaaatatttccctctgccctcatacagaataattgggcatggaattttcgggccataatcttttcctctcaaactctgtagtttttgttactaattttgatcttagccaaaaggtgaagaagcaatgaattttctgtttgttttttttttttcagacgtgtgtggcatatagcaatatatgaagctaagattatttggaatgtattttagtcaacctaacttttattcccacttctatttaaagtgtttaggctttatatttgaagtgtcaccatattacttgaataaatctcaggttgtaattctgtgtttttttttaaattaattttgcccaggatcaataaattcttttagttcgcagattttttttcttttactcaataatgtttccttctattactcctttaattgcttctggtgtgtgttttttaccaaaagagaggtttctctgagacacgtcttttatgtgtctgtgtgtatagatagatagatagatacatagatagatatttttacatataaatgtgtgtttatatacaaatatatacaataaaaatatttattgtatacttagtatataaagtatgtatatatctcacacaatgcaaacgcacacacaagtatatatatattctattatgtatatatggtccatattcccctaggctcatcattatttgtttttttctaagtttcaaagtttttttcctttatctttaaacgcttctgaattcctataatcttttttcttctgatacacatagttgtttgcataaaatctgtcatttaccacttttacgatctgtcatttaccacttttacgatgagtccttaattcaaaaattgaagcaataatgtatcctttaatttcttcccttatctatctttcctgattttagattgtttcacttactgtatgcttacttaatttcacaaattctatgtgtcttctagaagtttaatcagaaatgttctcaactttctatatttaagagtttttctctgattcctgggaactggtaaaatgtagaggtttgctcttgagcccatttgatgagcctgtttctcaagcatggattgctttcacaggagattggaagagaaattttacccagtccctttgttctctcttcttcttctctctggttcttggttctgctattggttcttctctcagtactgtctcttcatacttgtacaattcctgagtttttatataaccactaaaaagttgttggcatagaaaagacaaagacccaaccactcctctgaggggttttttggttgttgtttattttctagatggaaatgtaattttgggcttgcttcaaatgaatgtagtaaccagaagaagccctgtgttctagagagtgaactccagaaacaattttccagaaaacacatattttctataataaagtattaaacagcaaagcgttcaagataccaagtatgtttatttgtcactatggacgtaaattctgtctcattaaatgataaagttcccttcttttgagatgtgccctttggcccatgccactgtggctgctagtgtataatgcaagaattagattatcagcacccattggcatgtctcagttttgtcttatgttgatccacgtcatgtaagtatatgtgtaatacatagaaatagcaaggtagaacttagttttaattactgtatgacttatattagtatttgcctcatgctttttatttaactaatgactcacagatgctccttttcatgttatttgaattttagaaatttatctatgctatctttcacttctaagtgcaatcatctgcttgtgtcatgcctcttgccatgttccactcagtagatgtcaaaaattagtctcttgcttctctagttattttaattgtgatgttagggtgtcaattttagatctttcctgctttctcctgtgggcatttagtgctataaatttctctctacacactgctttgaatgtgtcctagagattctggtatgttgtgtctttgttctcattggtttcaaagaacatctttatttctgccttcattttgttatgtacccagtagtcattcaggagcaggttgttcggtttccatgtaattgagcagttttgagtgagtttcttaatcctgagttctagtttgattgcactgtggtctgagagacagttcgttataatttctgttcttttacatttgctgaggagtgctttacttccaactatgtggtcaattttggaataggtgtggtgtggtgctgaaaagaatgtaaattctgttgatttggggtggagagttctgtagatgtctattaggtccacttggtgcagagctgagttcagttcctggatatccttgttaactttctgtctaatgttgacagtggggtgttaaagtctcccattattattgtgtgggagtctaagtcactttgtaggtcactaaggacttgctttatgaatctgggtgctcctgtattgggtgcatatatatttaggatagttagttcttcttgttgaattgatcccttcaccattatgtaatggccttctttgtctcttttgatctttgttggtttaaagtctgttttatccgagactaggattgcaacccctgcctttttttgttttccatttgcttggtagaccttcttccatccctttattttgagcctatgtgtgtctctgcacatgagatgggtttcctgaatacagcgcactgatgggcttgactctttatccaatttgccagtctgtgccttttaattggagcatttagcccatttaatttaaggttagtattgttatgtgtgaatttgatcctgtcattatgatgttagctggttattttgctggttagttgatgcagtttcttcctagccttgatggtctttacaatttggcaagagcaaacacattcaaaagctagcagaaggcaagaaataactgagatcagagcagaactgaaggaaatagagacataaaaaacccttcgaaaaatcaatgaatccaggagactggttttttgaaaagatcaacaaaattgacagaccgctagcaagactaataaagaaaagagagaagaatcaaatgacgcaataaaaaatgataaaagtgatatcaccactgatcccacagaaatacaaactaccatcagagaatactataaacacctctacgcaaataaactagaaaatctagaagaaatggataaattcctcaacacatacactctcccaagactaaaccaggaagaagttgaatctctgaatagaccaacaacaggctttgaaattgaggcaataactaatagcttaccaaccaaaaaaagtccaggaccagatggattcacagccgaatcctaccagaggtacaaggagaagctggtgccattccttctgaaactattccaatcaatagaaaaagagggaatcctccctaactcattttatgaggccagcatcatcctgataccaaagcctggcagagacacaacaaaaaaagagaattttagaccaagatacttgatgaacatcgatgcaaaattcctcaataaaatactggcaaaactgaatccagcaacacatcaaaaagcttatccaccatgatcaagtgggcttcatccctgggatgcaaggctggttcaacatacgaaaatcaataaacataatccagcatataaatagaaccaaagacaaaaaccacatgattatttcaatagatgcagaaaaggcctttgaaaaaattcaacaacgcttcatgctaaaaactctcaataaattaggtattgatgagacgtatctcaaaataataagagctatctatgacaaacccacagccaatatcatactgaatggacaaaaactggaagcattccctttgaaaactggcacaagacagggatgccctctctcactactcctattcaacatagtgttggaagttctggccagggcaatcaggctggagaaggaaataaagggcattcaattaggaaaagaggaagtcaaattgtccctctttgcagacgacatgattgtatatctagaaaaccccattgtctcagcccaaagtctccttaagctgataagcaacttcagcaaagtctcaggatacaaaatcaacgtgcaaaaatcacaagcattcttatacaccaataacagacaaacagagagccaaatcatgaatgaactcccattcacaattgcttcaaagagaataaaatacctaggaatccaatgtacaagggatgtggaggacctcttcaaggagaactacaaactactgctcagtgaaataaaagaggatacaaacaaatggaagaacattccatgctcatgggtaggaagaatcaatatcgtgaaaatggccatactgcccaaggtaatttacagattcaatgccatccccatcaagctacaaatgactttcttcacaaattggaaaaaactactttaaagttcatatggaaccaaaaaagagcccgcattgccaagtcaatcctaagccaaaagaacaaagctggaggcatcacactacctgacttcaaactatactacaaggctacagtaaccaaaacagcatggtactggtacaaaaacagagatatagaccaatggaacaggacagagtcctcagaaataatgccgcatatctacaactatctgatctttgacaaacctgacaaaaacaagaaatggggaaaggatttcctatttaataaatggcgctgggaaaactggctagccatatgtagaaagctgaaactggatcccttccttacaccgtatacaaaaattaattcaagatggattaaagacttacatgttagacctaaaaccataaaaaccctagaagaaaacctaggcaataccattcaggacataggcatgggcaagctcttcacgtctaaaacaccaaaagcaatggcaacaaaagccaaaattgacaaatcggatctaattaaactaaagagtttctgcacaacaaaagaaaccaccgagtgaacaggcaacctacagaatgggagaaaatttttgcaacctactcatctgacaaagggctaatatccagaatctacaatgaactcaaacaaatttacaagaaaaaaaaaaacaaccccatcaaaaagtaggcgaaggatatgaacagacacttctcaaaagaagacatttatgcagccaaaaagcacatgaaaaaatgctcatcatcactggccatcagagaaatgctaatcaaaaccacaatgagataccacctcacaccagttagaatggcgaccattaaaaagtcaggaaacaacaggtgctggagaggatgtggagaaataggaacacttttacactgttggtgagactgtaaactagttcaaccattgtggaagttggtgtggtgattcctcagggatctagaactagaaataccatttgacccagccatcccattactgggtatatacccaaaggactataaatcatgctgctataaagacacatgcacacgtatgtttattgcgccattattcacaatagcaaagacttggaaccaatccaaatgtccaacaatgatagactggattaagaaaatgtggcacatatacaccatggaatactatgcagccataaaaattgatgagttcatgtcctttgcagggacatggatgaagctggaaaccatcattctcagcaaactatcgcaaggacaaaaaaccaaacaccgcatgttctcactcataggtgggaattgaacaatgagaacacatggaaacaggaaggggaagatcacacaccggggactgttgtggggtggcaggagtggggagggatagcattaggagatatacctaatgactaggtaattaactagataatgactaattaactaggtaattaactacataatgactagttaatgggtgcagcacaccaacatggcacatgtatacatatgtaacaaacctgcatgttgtgcacatgtaccctgaaacttaaagtataataataataaaaaaaaggaaaaaaaattaggctcacaatcaacaagctgtattgtacttttaaatacattttataatcataaacatgtattttttttctgagcacctacttggtgaaaagttttagaatttaattactctgtcatccaaccaaggaagctttcaataaaaatatagacactcaaggagaagttaggcatcaccatgcttcttctttctggggaaacaagatgttatttggtcaaagatttttaaattgaccctaagcttcttcaataatttgtaaatacccagttgcaaagagaatgtataaatgtctatctaactctgagaagcttggtgtcatagggaaaatgctagtttctctcttgctgcattctaaggcagagcgcactgatggccaaagggaatctggctgtagcccaaacccatttctctaacttccaaaccagagaggacacactctgcttccaatagcccatccaacaatgatggaaccatggctgatgggaattatctcaaactcatcaggaatgaacacacacttgctaatgactaacttccttcccctccatgtgtccctgcagaggaagtaggcaagagagagcaagacccttggctcaacttcagccttttcccctttttcctttcccaaataccctctcctctcactccattagcattcttgattcttgaattcccatcaagttttcaggggaaggggaaatactatttcttgcactttttgttggcgaagaaactgatgctgtctgcctttcattgttctacccagcatccggtttggacttgactgagggcagtgatgaaggtgaacatccagttgtgtcccatgtcctttgaacaactgtctttacacagacaaaccattttggagactgtttatgcttacttgaagtatcagtagcaaactcactgcattacccccagtgagggccactgatggcattcaaaaagctgcaaaaacaaaaacaaaaatcaaactcataactaaaaaacccacaatgtcctcaatatattgattaaactttctgtatgactatagacatggaggagaagaaatcaacagagagagagaaataggctctagaaataggctctgctttcccaacagcaacaatggttgtgccttatcatgtgaataacaacatactagagttgaaccatcatactattggtatatagtaggtgatcaataaaatagttgtgaatatcagtaccatatttgcagtatacttgcctttctaggtaactggatctaaaggataaataaagtacatctaacttagaactgaggagaggtaaattgtactctttaggttatggaaatatttttaaataaactctttcttttggaattatctttgacttacaaaataattagctgagtacagagagttccatatatttctaactcagtttcccctaacgttaccagcatatattagcacggtttatttgtcaaaactaagaaaccaacattggtactttactataattctagattttatttaactttattttaatttcactagttttcccatttttttgttttgttttgggatcaaatccaggctaccacactgcattttgtcaccatctctccatagacaactctggttagtgacagttatttagtcttactttgtttttcataatcttgaccattttgaggaataatggtaagatgttttatagaatacccctcaatttgggtttgtttgattttccttatggtttgactggggttttgaatttttggatagacgaccacaaagttacatgatatccacatgatatcactgatgatgttaacctttatcacttggttaaggtactgtctgccaggtttctccactgtacagttattatttttttccttttatggaatagcttctagtttggatatattataatttcatttagcaagtctttttatatagatcaggaaatggttctttattgtgaagttaaaaagaaaaacaaaaaagaaagaaatgtcttgctggaatcctggagaaagtttggtcagtacttgattttggtatcaaaatcacccaatccttgtggaatttgaaagaggttaagattgtagctgagagtctaagccatgcaacttctctctaagctcttatcatgagcacagggtctgcacaccatcttccatgggcactgaagttaacagagaaatccttccacccccacccagaccttttccatgttcttctctttaccatttctcatcgtctctctctaaccttccattgtgccctctgacaggcaaggccccatctccccatgttgtgtcctccttcacggatcgtcagttacttctgtgtctagttcctaaccttcataaaggacagaagtgggcgggggttatcagatgctgagactgtgggagagagaggaaggtggccctctttttggcctgctctctggatgaagtatctacaatacaactagacctttcacaatgtggaaattacaacttctgctagcatatctcctaatttcacgatgtttgaagaggatttgcctccttatccatcttgaattactatgtaattctatttctattaatgcagtattgataaaccactttccaaaactggaggacagaggtcataggggttaaaatgaatccttccattttacataggtcttgggttaaatatcattggaaaaatatatttatttatttttagtttttgagatggactctcactctgtcacccagactggagttcagtggcacaatcccgactcactgcaacctctgcctcctgagttcaagccatcctcccacctcagcctcctgagcaactggaattacaggcgtgcaccaccactcccagctaatttttgtatttttagtagagacggggttttaccatgttggacaggctggtctcaaactcctgacctcaagggatacaccagccttggcctcccaaagtgctgggattacaggagtgagccaccacacctggccaaagtatcttaattttatttttaagaaaaatccaggaatagcaggagttcaggtttctgcttaagctgtgttgtcttctgtggttcagatatatctgtgtctgtctgtcccactgtgtgggtgactccttcagggttttccttgtatgaggggtcagttttcatcatagtcttggggaagggggaccttagttcaaagaggagaacttctactctcaaggagataaaatttggaaaaaataacttcagcagttagtgattttgcagtttcagtaatcaatacataaattattaaaaagtataaacttgccaacgtttgaattgatgatttaaaagataaagttgatgaaatgtgtcataaaagaaagtagaaacacatagttatagattcaaaaggaaagataagagttttgaagacagtgccaggagattagactcattgaattaacaggaagaaaaaaggaaagatgaaggaaaagtaatatttcaaaaagaactataagacaatgtttttgagcagcagaaagataaatatacagttttgggtttcttgctaggtatcaaaaaattactgggaaaaaatgtgaacttttgaaattccaaaatcctaagttacatacaaatgcttaaagcttccagttataaaaaactgttcacatatcagagttaacctgtttagcctcagatttgcctccaatacatggacgctattccgcaacatgtatagacttttgagaggaaaggcctgcaatgtcaaattctacacatgcataaaatattatacacctattgctgaaacaaccataaggtgagaatagtctcagtgaatacaatccatgtttattatttggaaaaatatctgtgaactctaaataaatttcagtgcaataagactagaaacctcaatatattggaagatataaaaggggaaataacaacaatgaataaaagatggataaaacaatagatggacacaatttctatgcttatatacatatcatatataattgaatgatgataatgttactgtgaacttataagcacacagtgagtctttttggaagaggaaacgtgtagcaagagaaatcctttcaatagactgccccccacaaagaaaacaaaaactaacaaaaaaacccctactttttcaacaaaattaagtggcagatgtgggagaagggggggaataataaagaacaaaaaaattaacatataataatatgccaccacaatgacatacgtgagatccaaataattaaattgttaaatataggttcatgtgttattaatttattaaaacatataatacattatttttaggagatctgtacggtctaaaatcacaaaagatagtgtaaagtatacaaaagtacacaactgaaagatacttgaactgaaaagtcccaaaggatcacaaggtggtcaaatcctaaccacagcccacttcttataaagaataagagctttaacctaaccctgtttgagaactggagctgggcagaggtgaggagccatttactaattgcattttctccaaattcaggtttgacaggggttactgcaacttctaagatctcatattgaggtaaaaagtgaaggtattctaaacatttatttcagtgggacgggggagtggatatgtaaagtgtcagtgggaaaaatacaggtttaattgtgacagttaagaagtggaagttactactagactaaaaatgcaatagagcttctaaattaccaggagattaccaacagtgaatgaagaaaaatttcattattgtttattattagacaaaaatctaatgatgcattggacaatattaacatcagaacaaagggaaatcaaggtcatcggaactaaacaagatagagaggaatattatgtaataataaaatttaacagtccataagagacttacaaatgatgtacatctttacatagccaataacactgcagaaaaatgtaagaattgagttagacgtcgaaagctatggtaacttgttaaaataaaatttcattggaaaatttcagtgcaactatttcagaatataaaatcaatgaggacacaaatagaatatttaaataatataatcaataaacacaatttaatagatttgtatgcaatgtactatcttaaaatatgaatatacatccttttaatgtccttggaacactataaaacaacactaatacacttagatacaaaaaattttaatatctatccaaagagatattttataggcctcacttttgatcatagctttctctcccccaagattaaaatcaataacaaataaagtctatgcctgaaaaacataactagctcatttctatttaaaaatgtttttctaacaatacgtgattaaagaggtgaaaatataagtcacaaattatatttaaaggatgaatgggaaaaataaaccctcataaaaaaaaccaatgggtcacagtcaaagctatctattttcacaggaaaaaaataaatttccagaagaaatattttcagggttaattaatatattttctgaggaaaatatgtagcctgaaccgcatttaaaaaattattgttaaaagaggaagccttaaaatagattaaaaaaaaaacaacccttgatttcaagtatacaaggtgtaagaaacaatgaacagtttacaaaaagagttacctaaagtcaaagtaaaatgttaggaaatgatttgtgatggggaaaaatggatgaagtggtcaggaaagccctttctaaagaactaacattcacagaaaattaaaggaactgagaacataagtcaagtgaaaatctagctatttatgggacttctctttgtggtacctgggattacttatttttggttcatattgaggtagccaagaaggcttaggtaggtaactagaagaaacaaaatcatttcctttcttcattgttttataacagtgaacctatctttacagcttcttatgattatgtagttagtatatttgtattataaaaatcaagaggaaatattaaaaaataaatgtaattgtcccttgaaattctgctgtatgaagaaaaccaaaatcaatgttacagatcatctgttcatgcacctcttcatgtatgtgtatatatgtatatacaaatattattttgtttcttatggtacatattttaatgccatgttttatttttttcaatgtttgatatttatcttctgctttccctcttctgcctcagataactaagattggccacatactgctactctttcatatcttattcaatgcccaaatgatcaagtcactgtgactgtagctttaactgttgacacagatttagatgataacatggatatagacagcaaaattgtcatcattattttgttttaaaaaatgatcacaatcatagtgcttctttacatcttgtttttctcctttcctcatagactgtggcaatctttccaagtaatttggtctgaaccaaatgtagtctgttagtagtaaataataatccctgatatgaatggaccataatctatccaatctgtatatttctgaatagtattcacttttccattctagtttttgttactgtcaaaaatcctgcaataaatatttccatgtatgtatttttatattttgctatttttatttatataaatttggctctgaggagtgagatcaatgagttgaagaatatgtatatttttaacttttaatgatcctttcaaattgctttccaaaaaaggttcattactaactcacatggacagcaacaatgtctgagctccatgctatctacatccttatcagcaaccatttttttctcatctgataagtatgaaagactaccttgacattatttttatttgcatttttccaacaaaaaggttgcatgcctattcttttgcttccgttggtcttttatgtttgtaattgtaggagctctctaatcatacatttttcccattttttcctggtggtgtgtatgtgtttttcttgtcaatttgttatcaataatattattgataatagtattgtaatgtaaaaatgttattattaataacaatatattattgataatagttatcaataatattattttaaatatattgtgacctttaatctagtatgtgtagcatgtatcctgtgtttcagtattgattttaaaaatatttaaataaacaaaagtttaattttcatatattcaagtatctctgctttttccattacacttttgggtttattgttttggttataaagatttcaccaccctttggctttaacatttctcctgacatgttacatagttataatttttaaaaatatttatgtttttattacagttatggtatttttaaatatgacatgaagtagatatctaactatctctgtttttgatagaaaaccagttgtgctggcatcacttattaaatttccactaaattgaaataccatttatttaatttatttagttgtcatatatattttagaatcagattctgggcactgtattctgtttctctggtctgttttattttttatgctaatacaaactgttttcattacagagacattatcatatcttttattatttggccaagcaagctcttccaattcttcagaacctgaagctgaacataagtgttgccctcattctaattttacatattttgcttttccagtgggattgtatggtacccaacctttctgtaagatcatttttgcttaaaaacctcaagtggtttatgcattcctagctgaactctgagggatgcagagtatatcaaggcagctaaatattttattaatatatacatctagctgggcagagatatttagaataattaattttcaagaatatcatttttaatagcaacaaggaatataaaatgtctaagaataaatttaacaaaacatgttgaagacatttatggcagattttcataaaaatacataataaaaacatttgatatattaaaattgaaattgactgcataattaacagcatgaaaataaatgacaagccacagactggacaaggaacttggccaatcgaataacctacaatgttttagtacctaaaatatataaagcattcttgcaaatccaaaattaaaaatgcaaataaactagtagaaaagtggcaaaagccaataaggacataaaaagatcataaatttcgcaatgaataaaggatgtgcaaattaaaaccacagtgaggtatctttttatccatcatatttgaatattttattttttaattcacagtatcatgttagtgagcaaatgcaactaaaggggctttaagggtctatttattgataacagtaatagagatatgcaccatgaaattatagaaatcctaaatttgtattcatctaataatatgacctcaaaatatatgggcaaaagttgacattactaaatggagatatgggcaaattgataatcatagttgtaaattttaatacacttttctcagtaactaatgattcaagcagacaaaaataacactaaggacatagaaagttgaacaccagatgaaccaacctgaactaacagtcatttgtagaacactacctgtagcaactacaaaaaggcattcttatcaactgcacatataatatttaacaaaacagaccatattcttgcctataaagtaagtcttaacaaatttcaaaggactaaaatcatagagcatatcctctgtcaacagtggaataaagttagagaccaataacagaaaggtcactagaaaatctccgaatattttgaaactaagcaacacatctctagatagtccttgggccaagaaataaattacaattaaaattataaaatattttaaagtaaactccaaaataatatatcaaaaccataggatacattcataacagtcctcatagagaaaattattcttcaaaatgcatatattaaaaaagaaaaaaaggttaacaataaaaaatctcagttttaccatagagtatttagggaaaatacatagcaaattaaacccacagaaagtaaaaaactaaaagaagatataaatgaaagagtaaatgatatggtttggttgtgtccccacccaaatctcatcttgaactgaagttctcataattcccatgtatcgtgggagggacatgatgggaggtaatttaatcataaaggcagttaccctcatgcttttcttatgatagtgagtgagtcctcacaagatctgatggttttataagggcctttccccccttttgctcagaacttctccttgctgccgccatgtgaaggagaacgtgtttgcttccccttccaccgtgattgtaagtttcctgaggcctccccagctatgcctaactgtgagtcaattaaacctcttttcttaataaattacccagtcttgggtatgtctttattagcagcatgaaaacagactaatacagtaagcaaatgaacaagataaaaaatgagaaaagctttttgttacagtgtgaagaaacaaaatatcaacatcaagattcctacagatccagtcatcagaagaatcataacacgatattagaaaccagcatatgccaataaatttgcaagtttaaaagaaatgaaaaaaaattttgaaaaaaaggaactatcaataatgacacaggacaaaaaattagcaaattgacataaccctatatccattaaaataagctgaatctataatttaaaacttttccttaaaaaatctccatgtccagatgacttcactaggcattttttttcaaaactgttcaaagaagaaataatattaacacacaacatatacaacatgcaacaacaacagagaacagaaaaacaatattaccaagccactcaatttagaaaataacaataacattgataccaaaacttgtaaagaatattacaaaaataaaagaaataaggatcaacattgttcatgaatatagatgtaaaaatctaaacaagatgatagcatatgaatttaatgccaaacgagaaaaagaaggatactaactcacctttttagatataattagcttatttaaaaagagggagatggagattatttatgatagaagagttcagaacttcagtgaaatgggcatcttcatgttgataccacttcagtagtgatttatttctgtctacattccttccaagaatgtcaccatctctaaataagaataatccttgtcatctataactactttgttgcctccatattctgggagacaaattttatctccaaatttcagactaattggttgtatctctccacgctttcctttacagccagacgtaactaccactactgttgcttgcaatacttatccttgagattttttgggaagcataatacctcctttggttacagttttgactgcgatactttcaaccaatactcagtcagaaagcaaaaaaattaaaaaaaaaagttctaaatgtttgtcctgccatgactcctgttgttcttgtgctgctgttgcatggaaagcctaattcaatttgctgagaggtaccttggaaaaaagtctacggttagtggtaaaatattaatggtttacttctgagataataaacaaaataagaatatccatcatcatcacttcaactcaacattgcatgttctagccagtggaatgaagcaagtaaaataaataaatctgggaacgttgggaaaaaaatcatgattattcatagaaaacatgtctgtatatatagaaaaatgaaagactcaaaaaattaatggaagtaaggagtgaatttagcaagttcactggatatagggtccatatacaaaataaattttgttttcataagctagaacatgcaagtagaatattaaattttaaaagtattatttcaatagcaccaaattcagacatattgctgtctaaatctaacaaaagacatatgcaagatctctactttgaaaactatacaacattgttcaatgaacctagaaaagacctatgctcttaaattgaagggcttaatattgttaagatgtcaattctcttcaaattggtctatatgctcaatgcgctcaataaaaagtccagtttttttggaaattgacaaagtgattttagtgcatctatgtctgtgtgtgtgtgtacacacacacactggactaaggcaatcttaaataagaaaaataaagttggatgaccatatatcaagatttaacataaagtttcagaaatgaatatactctgctcttagcaaaggataaacgtattagtccactctcacactgctatgaagaaatatccaagactgggtaatttataaagaaaagatgtttaattgactcagttccacctggctggggaggactcaggaaacttacaatcatggcagaagtcacctcttcacagggcagcaggagagcagaatgagtgcaagcaggcaaaatgccagacacttataaaaccatcagatctcgtgagaatttactatcacaagaacagcatgggggaatccacccccatgatccaatcacttcccaccctggtccctcccatgacacgtggggactatgggaactacaattcaagatgagatttgggtggggacatagccaaaacatatcaataaatacatagaaaaataaatagaagatccagacccccccaaccaatacctcgcagaatccacacatttatggtctccccagcaatgaaaaaacaaagtatcattttagtggggaaagtacaatcattttaataaatatgcaggatctatgctatatctctttggaacaatgagaattgacccttacctcccacatttaatttgagatgaatcatagaatccaatgttcagggaaaaacaatgcagattctacaagaaaataccttcagaaatgtagagtaggccagagtttttcaatctcatcactattgatacctgagaccagataattgtttgttatgggagttatcctatgcactgtgggatgtttagcagcaaccctctattgactagatgccaccagcatccagtagctaaaattaaaaaggctgacaataatacatttcaaggatgtagaacaactgggtttcataattactctttgggagcaatgaaaaactcttgagaagtacctgttaaagctacatattacttgtaatttatgctctatgaacaaccaatttctctttcaaatatatacacatacacatatatatatttgtgtcttacatatatatatttgtgtcttacatatataacatatatgtatatattatatacatatctatacacacagagagagaggtaaatctgtgttcatatccaacaatggcatctttatagaagcattatttataatagccccaaactggaaacaacccaaagtggagaatatacattaacaatggaatattacacagcaatgaaaataaattatggctatatgcaaagcaaaatacatcttacagacttaaggttgagtgaaaaaaggcaaatatgaatgatgaccgttgcatgaagttgaaaaacagtcaaaacttatctgtggtgatagaggccataataggttaactaatgaagagaacataagacattctgcaagggtactggaatgttctaaatcttgatctagataataacttcatctatatctatacaaatacagatatagatatgaatattaaacttcacttttggatagagtttatctcagaaatctggagaatgtaggtaaagaaagtggaatatgatcaagaagacacatcaactgagattgcattaaagatatatggaaatttggtgagatttgctctgttttaaatactaaccctttctttctaataatgttacatctttccatttctttaactggtatgcccttcattaagattttatggttttattagtgagtcaagtaccttcatttttcaatttattcctaattagtaaggaattttgttgcttgtgtgagtagggcattctcccccattcccatttatagctgtttttttgcaattagatacttaaggaagctgtggatgtttctttatatatgtacacagaatgtacaaaacatgcattaccattgtaccttgttagttctagaagtgcgtgtttgtttatttggttatttattagagcttcttggtttatattggtatataagcataaaaatcaattgtctataaaaataactgactttctattatttttcagttagccagggtgtaaagaaagtagcaattgttgctcaaagtattctcgagcccaacatgattcatcacttaattctgaaatgtcactgtaatctcatttcaatatgaggaaatccgtacagtgtctcagaggcgcctgttctccatcacaaggagacgactcacaagagatcaggaatgcattttctctaattgattttccttctagatgtgcatgccagttctgtcactttctagttctgaccatgaacaagttatttggcctccttaaggcttagttttcacatctttaaaatggagaaataagttttacttgaatggctctttcaaaggtcaaataaaatatttaatgaaaataaaaagcttaatggagtgactgacacatagaaaggactcagtaattattagctagtaatagttatatcttatacatggtgtttatacctaagacagtgcaaaagcttcatgtttcagaatcagctacaaatccaaattgtacctttctcctgagaccgtaagttattctgtcttgttacccattgctgtcacagagcgtggttcctagaaacaactggaagccatctgcagtgagtttgggcaacctcatggttgtgttgagtgatctgatcccacagctcaggcatctgacagctgcagtattcgtgcctcacttttctgcctgactcttgctcttggtgaaagcagttactgcaccaccactctctggactttttccgctgcatcgtccttttgtcttttcaatatggaactgagattctgtgaacaacagggccattttacagcctataggctgcactctgcttgggggactgagcattctgaggcaggttcctgccctcatcccgttctggtcccatatcatgattgttccagtgaagaaggtgttgggaggtgccccataaaccttccatatttagggtcttctgagctggcagcccactgaagacaaacatggccatgtgtcgatggttgtggaaagaggatgcatattgtccaattgactgccaccagcatggagcatggcatgctggcagaagcacaagatccagaagaggatagaaggatcccaggtctgggggaaactaaactgtttcatcctttgctaagggctggggcccatcaggatgctctgggctgtgaagtcagggcaggagaacaagactgtggaggaaaatgtagtcagaaaagacagtctcagcccacttctcatctgtttcattcaagcctgaatcatgcctcatctctcctcatgctcagcagataacgttggatcaactgtatgttcatttaagtctcctcagcgttcttccttctgatccacccatatttttaccatcatctcctaccaacctacaggcagcctccctgactaacatggatctctgttctgttctgtgcaatttttattaatccatctttgttcttcacatctttgtactacccttttcttccagtatggtcagtgtcttcaccatctctgccatcgaagtttaattcctatctctccctggggatcccctctccagggactgctatcccagtctgcctctcaaaattaaattctaaagaccccacaaaatttttgaggatttttccaattgtcctaaaaggttataatcttaccttacagggaatttccacagaaccactcacattacattcacatttgtaatacatttatctgcattactagactggaacttcctgaggtcagacactggggcttaattatttttgcatctctagtactgcaaagggtaggttgaacacatattggtatttgaataacaaagaggaacatttatatgacgatggtatatggaaggaggacatgaagagccgctcagcaccactagtttattaggaaaatgcaaattaaaaccacaatgagatacccactaaaatagctgaaatgaaaaaactctgacactagtgctagcacttttgcagagcacctgggactcttgtgaattgctggcagaaatgcaaaatcacacagccattttgtcaaacagtatgacagtttcttaagaagttaacatacacttactgtatgacccagcaatttgtctcctagatatttacctaagagaaatgaaaacttacgtttatcaaaaactaactaaacaaaaaatctcccattcctgttacagtggcttcatccataattttcaaaaattagaaacaaccccgacatctttcaactgcagaactgataaacaagctgtaccaagtccatgcaatggaatactattcagcaataaagaaaacgaactactaacatgaataacagctggatgaatctcaaatgcttgaggctgagtgaaagaagtacactcaaatagtttcatatcacataattctatttagatgacattctgcaaaaggcaaaaatgataggaaggaaaacagatcagaggcttccaggggttgaagaaggggtacattttgggggtttgatattaatgttttgtatcttgatatcaatgacggtaaaatgtttctatattttctaaaattcataaaactgcatacctaaaatgattttgtctgtatgtaataatatactttatatccaataaaatataatggaaagaaagtggaaatagtgaaacctctttcttatcatcaatgggccctagagaatcagcaacctatccctagctggctcccacaaactcactactttacccccagaagtcactgagatggtgaggctaggatgtgactatcacaatctgttcctgggtccaaagttgaaggtagtaatgacttaaagtgtttgataaatggggagaaaataaaagtgagtagtccagagttatcaaataatttatgtccagaacatgaactcaaacatttgactgacataaattttattgagttttctttacattaatccaactcagtaggccaatggatagaattcaataaaaataatgtctgtcaaaaggctgacattatttaattttaaaacagagttaatcagtctttactttgggctctcctagcccccgtgtataccccttgattgcagtatttattaaaatgtattttaattatgtttatatcccagtcttccccaccaggactttgggttccttagggtcagggattttaagttactgatatttgcactccaggtgcatcacaaagcaagtgctcaatacattttttgttgttgttgaaaaaatgaaaggatgaatgagggctcatggtttccactactacatatgtgacatgcccatctccccattctatcttctgcttctccataatttgcccactgccacacatctctaaattctgcagaccacccccaagctgtccttcctgtctcatagctgcagcaaaagccctcttaacgcccactctggttcctgctcctcttacaattctgtacccagacatagacatctcactgaaacattaaacagatcataccgtgctcaggcttaaatctgccagtggtttccaattaggcatagaacaaaaatcagattccttagttaagctttggaagccctacagttcctgaccctttctatctctgtgaccttgtgtctcactatctgtcttggccaatatgctgcttaccactgaatttccttcagggtctcacacatgcttggttgagtcagcctcatagcttttgtgtgagcagctccctgacctagaatgtattttgttctgctcttcatattgctggtttcttctcagcatgagatcatggccacaacatccacttttccaagaggcctttcctgacacaatctaacctcactctctaacacactacctcatttaacttctctgtataactctcattccaatgggatatatatgttattcattgtgtatttgacaataattctgtcttcccttttggataatatgctctaagacagcaggaactctgtcttaactctggtctcctcatcaccaacacagagtaaatgtttaatgaacacttgttaagagatgaacagatggatgggtagatggatgaatggacagatggatagatggttggatggatggatggatggatggatggattaatggatggatggatggatagatggatggagggatggagggatggagggatggatggatgaatgtaatggacaggtggaaaggaatgaatggcatctttcacggaaggataggaacagctattattttctaacaaacagaaaacccaaatgaccttatccatagacatttcttctactctgtgttacactgaaatgtgttgcagaccacctcactgatgcctgtctttatctgatgtgcattatttacattaatagaagaggaagcagggaatcagacactgacttcagcagggtggataaggaaattggaaaaaaatagtagggaaaaagaaatgtggggatgttacatactttataattattacagctattccagatctgtacaactccccattccctcttagatggcaattggaggcacctgattttcttctatcctcctaaggtgaatgctcactcttttcccctcagcctgttcaggccacagcatctatgtagcttgtagacaaggagatactgacttttacctcattaactctgtctgggaagcccaaagtcatggttagacctggcacaaaacaatagccgaaaaatcagggtcatctcctttccaaatggcaatctgctttactgaggccaccagaatgtaatatagtctctttgcctctgccctgtacaaagatatgaatctgggtattttgttataacttgaaaatcaaggcagacgattaaaaaaattactctcagcaattcagttgaataaaggctttaatatctaaaatgaactacaggtgtaccctggcaattttaacactgagatttctccaaaaccaaagtcagatggagcaggtgaccaggtgccagagtttttcagacagcaatttctggagccagattccctgagatcaaaccttaccaactaaaattgggcaagtcacttactattttcatttctcagttttcttattatgcagtttgtgctggtgtggtaagaatttcatgagcaaatgcatgcaaagcactttgcacagtgactgccacatagtaggtactgagtacctggtgtatctactcaaagtcattataattaagtgagtgaatagcttcagattttctttactctactctgaaataacaccagtcctaagtcactctttgaagcatcaattgctgaagattataatagttgatttccttcagtgataattccacattgcttttgtgctgttctttttccagagccttgggatggcaaggtatgggtaagatgggaacattttgccacatccattggcagctggagtgaaattccagcaggcactccaaatccatagctggtaagaatccagctgcagagcgctgcaggaagtaaacaagttccatccactccaacttccctctgttctacatctggggattcacagccacccccagacttcagaacaccctcatcctacacagtgggtcaactgacagaaaaaaacactgctatgaaggataatgtgtttgctgcagacaaaaatgattgaggccaaggaaacaactttttcatggtagctccagaaatttaattttaaagagcccttgagagaagccagtgtcttcctcaagagaaaagatggcaaattgtatcattttgattcacacccatgaatgatgtttctgcagctgtttgaattaagactgaaatacaagcaatctcagtaggagtctgtattttcataaaacaatttcctgctgagttagttcagccagctctaccccagacctttcacacacctcggtgatgaggacatttacaagatagggttatttttgcttattaaagagctcacggagttttgtaatatccaactcttctcaaggcgaaggaacatctctggatctccccacacacatatctgaaataaaatagagttctaacctgtcctagttgccactggaaaactctgtaggaactgcacaccaaagaacacagtcctagccccaccagaatgagatttctcatctaactcctgctttctttctttttttttttttttgagacggagtttcgctctgtcgcccaggctggagtgcagtggcgcgatctcgactcactgcaagctccgcctcccgggttcacgccattctcctgcctcagcctcccgtgtagctgggactacaggcgcgcgccaccatgcccggctaatttttgtatttttagtagagacggggtttcaccgtgttagccaggatggtctcgatctcctgacctcgtgatccgcccgtctcggcctcccaaagtgctgggattacaggcgtgagccaccgcgcccggcctaactcctgctttctaaacctcttgagttgaagctcctcaactcaaaacctggctgtccccaaccccggagtcaatcccaggtgaatgcttggtccacctgtacccactgagctgtcacatttccctacattcccagtagatgggcagcaaatgcatgaggcttttcctaaagcaactgttatgccctcaagggtcctcaatttcagacccctttgctcagttcctgacttcctgacacagtcttatgacttctttactggaaccagaatgctgtgtcctgacattttgcttttactggagaggaagtagaattctttattcttctacactcctctatgtagtgggagcacgctgggagggctgtgagaatgagggaggtgcatgttatatcttctccttcacatatactctcacattctgtattagtcagaaatatccttagaggttataacaggaaacctaatttacagccattcaacaagaaaaattccatctatttggagtttttttacagcatgtaacagcaatggaggtaagttgttgctggatttgattgagcagctccaacatggaaagactgagactgttctgattcttttggccttttcctcatggttgcaagacggctgctgaagcttcagccattatgtctgagaccaaagtaagacagaaaggaaaaagtgtttttcagaccttttgtccccataccagaaaagcaaacacttagatctaatctatcaacaaataacatcaatttacctcttcttggccagaattgggtcacatggccacccttagctagaaagaaagatgtaaaagggtgaaaataattgttgtgatggtcttagagcagggcttctcaacctcagcattatcatttggggatgaataattctttgttgtggagagctggcctgcgcacggtaggttatttaggaatgctcctggactctacctaccagatgctcacagctattttctcctccaggtgtaacaaccaaaaacgtctccaggcattgccaaatatccactggggaatgaaatcgtctgtggttgagaacgactagcttaggccaatcatgactcattgtctggtttaagatgcatggctaccctgaagaaaagtagggtatcaagaaggaagaataagaaaatatgtgcaaggtaaataatcgtgtcatgcctcagacacacagcctagacatgcatgtcatacctacacagtacacacccgcattcatgagcacttgtttggcgcttggagtcatggcataagcaaatgttcactggtgtggagaaagctcttttctcttcagactcctttccctatgtatttacatgtaaaatgtaattgctttggttaaatgcaattaaattcaaatcaattaaatcctttacatatttactgccataaaccaaaagtttagcttgagttaagcctgaatgtccagaaagcggagccaaagaaggaaatgtctccaaatcaagagatgcaggagctggagtgaaggataatgaagaatcaaacaaaacctcagaaaactaaggtatgtaagaaccagaaaaaagctaaatagtaaacacctatggtgtgctatgatgaacacttatgaaaatggaaaagaagttgttaacagcaaaaccagactcctctaggcaaggacaacttatttagtgtggcccaaagcaacctacaccatactgatcttcatgagtaacaagggaaaacttttatgttctgccccaaataacatctagggctaagcattcaacatcacccctgactgtaggtactaagtggcataggaagaaagaggctatcgctattatggggtcagagaagaacgaacttccttagagctcatcattaacttaggtctgtacagtagtaaataggaacataaattgctataggtaggaaaacactttgtacccctaattctgggagataagccttttcagacacagagactgagaattctttgaagtaagactgaaatctgatatcagaatgttattgtccccatggatgagatacattaagaagcagaggatcaaaagattattcacaacaaggaaataagaaaagtaaatttggtcagattagaggagaaatgtttatactcgccattcctagccaagactttctccaatccctggtgataaacttgggggtaaacaccttaacggcattataattacgtgtgtgtgtgtgtgtgtgtgtgtgtgtgtgtgtgtaattacttcaagtttgttggtataagcagtgcatttgtgtgtatatgtgtatttaactatcaaagcatttatcacattctgttttgatgtttaagttacccacctgtctcccctgctagactgcaacctctgtaagggtagggctgatgaacactatgtgtgttaaataattaaatcccttttaaattcgtgtatgtatcaaaaacatatttaatacatacttactaggcaccaaataccatgatgggtgctggggacacaatgctgaaagagggaaaacacacttagacacacacacaaacaaaatagacaatgatctttgtcttcacagagagattttagtcaatgtcaggcaacataacatttcaattgtgaaagtctatgacttggtaattggtaatttgacctaaatgagaagtgaaaactccagatgatgaagagaggtgagcctcctgtgtgctaactgggggtgagggtgagataatcagtcatccagtaacagtctatgaggcagtgaggcaaagaaaggtggaaggatggagagaggcagtgttgagcctggaatggacctttccacagggattcttcccactggtaaagtatatcccagtgaatcttaagctataaccaatcataaggtgtagaaaaaaaaaggcaccatgtgtcattccctacattcccttctgtgaggaggcacagttttatgtgaaaccaacatttacaaagactccaaggaagacagtatagacttacagcatctgagcacttaaattggacagtgcagtgcagccactatctcctgcacacatgttagggtgaggtctttgttgtacgaaacaacagagataataaaatggaagagcagaagtggccattctaattcaaagatggcagtaacatgtagtattgaaaataatagattctaggccaggagcagtggcccatgcctgtagtcctagctacttgggaggccaaaatgggaggatcacttgagttcaggactttgagaccagcacagccagtttagtgaaatccagtttctccaaaaagtaaataaaaaattagctgggtgtggtggtgagtctgtagtcctaactacttgagaggctgaggtgggagggtcacttaagcccaagaattttgaggttacagtgagctgtgaatgcaccactgcactccagcccaggtgagaaaatgagaccctgccccaataaaaagaaaaaaagggaaaagaacaaattctgcaggcagactacctggactcaaaccctggttctcccctctactatgtgtataacagtaggcaaattacttaaacttactgagcctcagttttctcatctgtgaaatggcctaacaacagtacctactccatagggttgttgtaattactagatgagtcaatagaagaacttaaaggagtgactggcactcgggaaatggtataaatgtctgttgaataaactaatatcagttttaggtccatgtgcatgcacatgtgtgtgtacatgtgtgtaaggacctgtgtgcatgcacatgcatatacatgtgtgtatggacctgtgtgcctgcatgcataagtgtatgtacatgtgtgtatgaacctgtgtgcgtgcatgtgtgtatggacatgtgtgcgtgcatgtgtgtgtggacatgtgtgtatggacttctgtgtatgcatgcacatgtgtatgtacatgtgtgatgaacctatgtgcatgcacatgtgtgtacatatgtgtatggacatgtgtgtattcatgcacacatgcagttgggtgaggaggagcctcagttggtctgaaggggttccagcatattctactcttgggaatatttcctgctgggtttcaggaggaaatattcaagttctgtacactaaattgaggactggctcacctaaagcaagcaaaaactaaagagaggtggatgctaaaagagcttcctccctaagatacagagcagttttcactcgcagccttgacctcggtggttttgtcacctaaaaccattctagtttcaagactcaagctacaatgcttttgagaaatgatctaataaaagaattaatagaactgtggcagaagtgagccctccaaaactggtcctatagaagcttctgtcttagatgttttctggggccagacaccggatgccctctttctccaggcatctcaaaaatagccatggtatggacaaccagcaacatgatgtcatacccataacaaaactggaattctttggatacatagctggagttttctccttctgccctacaaatgaaggctaggggtcttagaagcctccagaacaccattatttttcttctccattagactaagaagcaggcatcattcatttattataatggtgttcttcccacattgttactggcacattctgtgctttacaacaacaagaaatgaaacgtcccctgagaagcctcaggttacatttatttggctttcctttaataaaaaaaaaaaaggagtaaagccaggaatgaaagggagctgagagctgatgtactttcctgactgagttcaaggaggcagtctgtggtgaggccagagatgaacagggctggccactagcaggaaaacataagtgacggcttctcccagtaaccatatgaaaatgggctgatctgttctgggactcaaagcctgtctccctcatttcacagaaaattcaggagttttccaatactcagagaaccttcagaactgtgtgggtttgatacgttttcctaacctgtttgagtgcacagttttggggaactttcaaaggccagggtatgactttggaataaaatctggtttaatttcaggagaacacatttaattctgatgatatctaggcctcaggaaatgaaggcagaatgagatctcccagatttgactggttgttcatgccagtttgtatcagtaaaagctagctcctcaaagcaaaccagaactcagattcctcggggtgggaaagtgcagacagtggactgttgtacccaggaagcatgcctgaggtgctgacagaaaagaagtttcaatacgtgaatcttcagcccttcaacatagttcactataatataggatgattccagaggtgagaggagtgagggtgatgacggcaataattatgcaaaaattcaaaacagaagagacttgtgtaccctgatgtctcacctgtccactcttcttgacagaatccctcatacctggcagcaccaggactgagctttgtaaactgaagactggctgggttatagtcaaatggtaaggcagaagcaaaataccccaattctgaaaggagaagacttcaacagccagtgatggagaatttaatcttgggtcaaagccacatgagggctgcaggaagacaagccgtgtaaacaagagggtctactttttgaaattgctaaatacagattctgtgcctgaatgcctctgatagtagatctcaaaaagagggcattctgaattcttgttagaacctctcactgacctagtccacagactgaagctggaatctagagaacaaagagaagattagtggatagcttagcttttgctgcataagagaccacccccaaacctctgtaactgtaagcgtttatatacctctcttgatttttctgagattcatgattccttgcctggaagattctgattgggcatggcttggctgaggctgggtggtctagaatggccttactcacacatctgatgattgacgcaaagagctgtggctactggaatgatttaactatgtatctttcatcacccaataggctggcttggcctcatttacatggtgctggtcacaaagttctcaagagtgtccagagaaggccagctcaatgtgtgcattcattttctgagcatcagcgtggctctcattgaccaaagcaagtcacataggcagtccagagacagtgtgggatggcactaccaaaggtcatggatagagagaagaaaataacacatggccacttttacaataagccacaagttttctcccttccacccattctgtttgctcctgatagaatctcctcctctgtccactcacagtgactggcctgaaatacagttactaaaaggaaatctccccaacatacatagtgaatactcagttttggtgtcaatagttaacaagattctctcgtttgtcaagggttggattaaattaggatggtcagcatgttcctaacactcactgtttaaacagaaagggcacactcccattcgagttaagtcacaggctcaacagtaagtgtattttccatggggtaattgctaaagccactgcttttccaagaagaatccttttggagtcttttgttcttttgattgaaacttaatcagcttcttgtttgacaaaaatgacaggctgcatgaaaggggaaacagagtttgggttttgccaatcctaattcctatcaaacatcacaagaaaataagcactttctacataatgttctccactttgtgttttagactcaaatttatcacttaaaaagaaaagaaaaaaaaacaccctaactgtttatattttgggggaaaaaaagaaaagcgatggttaactccttctttctggggtttttcatgttaaggattttttaaggatcaagactcttgactttacctttcagtttggtggggtagagatatagggaagcaaaagttcgccagatcacttccagatgatacgtcctgaaatctgtcttccttctgtcacagaggacctaccctgcagtcaaagtttattgtctcccaagtctcatccagacttccaattctgaccccaagccctcatgctgaatttcataaagagaacacacatttctaattctgttatgaggaaagcactagatttgcaattggaagcacattcatcttggccagagactcactagctgtgtgatcttggacagattaaattcattctctctgattctgtttctgcatccatattacttctctatttgaagggtggctgggaggtttaaattaaagaatgggcatcaatgtgcaaacctggggcccaaaacttagtaagggcttagcaaatgttaattttatcctatctgatttctttctttccatctctttccatattattctcattttcccattctaggaaaaaaaatgcaggctagcatattccctttgaatgaaaagagaaaaagccatgctgttaatctctgtgacagaaaatatggaagacactcaacagagagaggcagctttggccagttttatgcctttgccagtgcttagttgtggatagacatgtaactctgccccagccagagctagacatatgggggggaggcccatctttctacaatcccatgactagtaagtggcagagcctggatttgatccccaacagtccagtttcagaatccatgtgcttttctactaagctataattccttgctaatataaacccattcattcattcattcatttatgcactcattgtccaaaaatattggctgggtgttgtggctcacacctgtaatcccagcactttgggagactgagggggggggcagatcatgaggtcaggagatcgagaccttcctggctaacatggtgaaacgtggtctctactaaaaatacaacaagttagccaggcgtggtggtaggcgcctgtagtcccagctactcaggaggctgaggcaggagaatggcatgaacctgggaggtggagcttgcagtgagctgagattgcaccactgcactccagtctgggtgacagagcgagactccatacaaaaaaaaaaaaaaaaacaacaccaactctgtagagcctatgaatgccaatcactatggtgaatgttgaatctgagcaaagctgctagggaatcccacacaggaaggcagtgaattttgtctgagggagaaaggcacaagtggactcaagtctcagattcattatttacacgtgtgatgttctgcatgttagttgaactcagtgaattgcagtctctactgtttttgtatagggtggattcgtttgggtactgaagcaaagtgaaaacagctaacccaaagcctacaatgtggtagttacccgagaaatgttctttaagagaattcataaaaaaaaggaagaacactgtacagggatatttttaaaggatcttcagggagacagagctcaggtggagaagagaagcaaggagaggacatgggtaacaaataatagggccagaaataaccatcttggatgtaggagccagggacaaacaggcctgagaagcactgtctggcctttcagagccccgcagctgaatcctgaccctaacacatatgaaaatggggccttggccaagttgctaaactgagaacctcaatttccacatctacatcagagaggtgaggatgtccccctcccacaaggtgtggaggttacatgaggtcactcatgcaagtgccatgttgttgatgctgcgtggtgattgataattactcaataagtaattgtggctcacatgtttatgacagcaagaaggatgatgaatgttgcagggtggtggggggatggacaggtcacactttgtagggctttagggttgccatcagggtccagacaacatttattgtccagtccattgataatcctgattttctcctggcttcaactaagtattttggactctaagtcaagggtcaaaccaccagtgtctccacctccatgtgtgtctctgatttgacaggctctaatgccagggctgcccttaaaaataatcctttttgtcatacacacagaaaaccatgcttttccaggttgaaagtggatcccatctcacaaaagtccagctcagattgagaatttagagccataaatgctaaggaggtacaatgctcagaaaagtacattagtacttcttccgcagatgccccttagaaagtcttacatccagagtttggcttccaggtaaatcatttctgaatcaaggctggcctgacattttcaagcacagccagttgcacttgcctctacactccaccttccattctgacacttttcagtaatgctgttaattgcttatggatgtatctccccaaacagactgtgagttcttcaagggcagtgcctctatttaattcacctgtgaattttaatcctgtggagtcaactttctgtagataatgcctgaacaaaaaaattaagaaatataaacaatcagccccagagccttgctgttgggagaggttggactctctggggcagctttgccccaggatatagttccaggaggtgggttcccaggcggaagggagaaatacaaatgtacaagcagatgacagcccgtgagctggatatgtcccggaaataaaaactggacaagtcataaagtttcaggccaacaccaaaggaagaaatgctgggtctttacatagaactgtcctctaaccccctagtgactagcaattatttcctcctgccctgctggctcccctacaaagcaaggggcgtccagtgaggagttctgagcccagcataagcaaagcaccaaacacggagtgtgtgaccctaggagacgcagggaatctcctcctgcatctctgtctgtgactgtgttgtaagagatgaggacgggagaaacaacgggagaaaactgtgacaggagaatttgggattctagcagaaactaacaccagaatcttgggcaaaggacacagaattctaagagagaagtttgatcatgtaccaaatagtcagagacatatttgcttctatgagagatctcgttcccttaagtgaaatgccagaccctaaaatttctagttatccttaaaagagtggacacacaagaaaaggaaggagggagggagggaaggagggggtgaggaagggagggagggagagtgaggaaaggagggagggagggaggaaggaaggaaggaaggaaagaaggagaaagagaaaggaagaaaagggagaaagatgaaaagaaatgagtgagaaaagaaaggaagaaagaaaggtgaatttccatcaagtaagacccagagaaaagaaagaaatgacggcagctgaaccacttttctctttcctttttaatctgactttagatgttctcctggtaaaatcattacaaaggccgtttatttttaaaattgaaagattgggaagagtcataatgagatactatgtgtaaaagttgcacataaatttcctcttgtcatattttgggcttcactaacgcatccccttgacaggacgaagggaagttgatcgctttagtatagattgtgcgcgcctcagaaatattgccctaggagagagctcctgggtggctgacttggctccatgctgatttagaaattagccgggcttttattggccacactaaattgttctcaggaaaaaaaaatacatttttattacagaacaaggggcagatgattgaaacaagcctgccttctccttcatttggagctgtgttttagactgttaagttgactttcttctctggggttctcgctgctgtttaatgggggcatacaatatctaccattaaagaaattaccttgtttctctcagtgtccccagggaattccttattccttaataaagttctgtttgagttctcctgagtgcatgagtgggcaggttgaggaaaacggagactctctatataatattcctattgcaagggtttagaggaaggggagaccaggagccgtccttaaagaagggattcagagcgactgtgagtctggccactggccattgactccagatctaaggccagaggtaacactacagaaatgcacaccccaatcctgtattgagtgaagcccacggcagggccgtgcaatgaacttgcatgtgaggccaaacctgtcaaaagccacttggaccaaagggaatcattcatttgtagagaatgcccaaacccactcatatccaattctgttctcttgaagtccagcctgactcctgtctccgactctgctttgacaggcggccttaggctcttcctcagttctaaacagggcattgatagattcccatggaactgctcactactgccctccacaaaactgcctgcctgatttcagacagcctcttgcttagaatctgttctaggtacagaacccctagcccttctccaggagaaatattatgtccatatggatgggagcagctagaggatttctggaaactttctaaagattagtttcacttcttgaaagctaaaaggcaaacatataattgtatccaaagtaaattactagagtaacacagagcaactggggtatttgaggaaggaattgttcggccaactgaaccatttcattaacccttcaaatgtgatccttgattttattttcttaaatacttataaaatgtaagcaccttcctgcattaatatgcaatatgatggagcccttaagatcttggactcaaggtaagtcagaattgaataggacacgtttgctgtcattttccaaatataggtccttgggcaaatcacatccagtttttctgatgcggttttctcatctataaaatggggatcatcacagccctgctagtgagaactttatatatgttgagtttatatatgataattttatatatgttgaatttatttaatatgtgaaatatgttaaataagtatatttaatttaaatatatttaaattacttattaaacagtaagtaccacacctggtataacatacaaactcattaaacattagctgttgacattgctcaccatcagctcagcgctccttagctgaaaggtagatttatttcccccacaagctaaattctacaatagagccaagtctcacaaaacgttagtggttcagctgagacagaaaacataacttttgattacttatcctcctccactaaacttcagaccacactgcctcctattaaaattaatttctgttcccttcaggtggagatttaaatttgtcatgcctccctaagccactggacccatagccctatccctgatttttccttagggaagccaggactacttgaggtaattaatccaccacaggctcccctaccacaactgggaaagaaacaccaaattctacttggtttcttactaattaggaacagagagagggagagagggagagagactaaggacgggaaagggctgagctaagtggggtgtggtccacatgtgttcccaatcatgaccacacaatgaaaatgttttctttctggggcaatcaggcaaaatcttggaaagatgaacttttttccccgcttctttatgtacaataataacaatatcccaaattcaaaactttttttttaatcttggcacaattttgcttctaaaacatttggaaaacatccaagcactgatggcctatgcctgacccttttctctgaggtccaagccacttattctataataataataagcgaacacatagatgatgcattctatgtgccagactctgttctaagtgctttacaatacattgactaaaattcaatctccttcaaaaaccctacaacttaacactatgttcatccccattgaacagatgaggaaactgaagcaaaatagatttagcaacttctccaaagttaatcagctagtacagggcagaggcaggatttgcactcaggctgtctgaactctagatttatgctcatcattatcagctcatacttctatcatgtacctccatggcagaagggctaggggaaaagcagagggctggggctgcccaagagttgaagatcaggaggcacaaaaactaagaagagaactcccaagaaagttggagtactaataggcaatggggtaccagtccctcttttgagttgtggctctgcctttctggttctacatttactcagttcatgaaccaaacacctgtcaccattgcccttgttcactctgctctccccatgctcttcactttgattgacatgcaaactttattctcttacactcctgaccttgaattccatttctagcctgagtgtcccctaggccctgaccttcacacctccagacccagccaagtacccggattctggctcctaattgctccctttgcttaactgtctagttgaaagttcagaccctgaatcagcccttggctctgattaattgcagcctggggctcagcagcaggggtctgaatcccttcccagtcactggagtagccagacttgacctctgttggtggagcaatggaggatgccatgcctacttgttgaataagaaggctgctgtgaaacatactacatgagttggtgcatatgtcacagatgcaactctgccaacaggaagaccctcaggggctgactgccatctgctgaaaggcaagcagggatggatggatagatagatggatggtatctgacctctgattccttccagggttagatttttggagagtgatgttcaggagcctggggaaaccatcattccaggaacagctggccgaactggcaccatggagcaattgatggccttcaagtgcagagattaagtttaggccaggaaaagaggcacaggtctgggatacagggcagtgattcaaagataatggatatgagctaactgaggagaaggaaaagaactgtacaatatgtgagggatattgatggtggaggattccattgtgcggttcccaataaatgcacacagttcaactctaaggcctgatctttcccgtaagactggagagtactgggagatacactaatctctcagaatagcagaaaacaggtgccttgcttcctggattatccaggaacaaactcaggggcaaactcatcagaaatgacataaagaaagcacagagaattaggagctatgcaacttatatatgctaatgtatgctgactgcctactatatgttttgagctgctttttgatgtattcattagcttcctagatggggttctaataaatcacatacatattatacattgatctatagtctatatcacattaaaaatcagctcacttaattaaagcagcaattgtgtgaggttataatcatattattttcattatctcattttaaaaatgaagatattgaagcacagatagtcaagtgacgtgcctgaggtcacaccactgctctgggctagagtactattcacactgctgtcttggtggctgtgacagtgactgacctcctgccttccaggtgtcccatatcctgttgctgagccccaagagtccaatggaaggggtagcctatatgcaagcagtcctgcccacatgggagagtgatgagcaactggcttatcgaggtcaaccatgtgctctctcctggaaattcagaatggagccatgaagtgagcaaataatgatggaatataatgtacagtttggtaaagagtgctaagagttgacaaccaggtcagacacagctgtatatactcaaaattcctggggaagaagaagctatgagcctgctcagaagagtgaaaggatgagcattttcccagggtagaagagaggccaaagacatcttgtggcattcagtaggtggaagtggtagcttcactgtctgattctcaatcagatagctctgtgtcctggctacaaatatgcttcctgtctttgagggtcatgtaatcgatcatgtcaaaaatcaatattgactagtttcctttttggtttaattaaaacaatccttccctaagagatgagcccctttataaatggagattatacctgagttaatgtgtctgtctgagattaaaactgttaggaaataataacgatggtaatgataattacttgaatgtttaccaggtaacaagcactgtgcttatactttatatgtattatctaagttaattctcatgataagcctataaagtatgtatgattgttattcctgttttaaagaagaggaaattggggtttacagaggttaagtaattcatttgttcattccacaagcatttattgagtgtctgctatatttcagtcacttttctaggagtttgaacacgtcagcaaacaaaatagacagagatcactttgccttcatggaaagtatgttccagtagggaaaacaggaaacaaataataaccatggcaaattagtaagttagatatggtattagatagcaaacagtgccatgggagtgaaataagagatctgggtggaggctacctgtagacacagggtggacgggagtgatggattgtgattttaaatagagacatcagggtgtgcttcattaagatagttatatttcagcagaggcttcaaggagatgaaggaaagaaccatgggggtatctgggagaagaagattccaggcaggggaaatagcaaaggcaaaggccccaaggcaggatcaacagcacagaggccagtgtaggtggagcagaaaggctgatggaaagagagggaaagaggccagagaagtaacaggaccaggtcacaggaccttgaaggccatcataaggacttatttatttatttatttatttatttatttatttatgacagagtctcactctattgcccaggctggagtacagtggcatgatctcagcacactgcaacctccacctcccgagttcaagcgattcttgtgcctcagcctcctgagtagctaggattacaggcacgtgccaccactcctggctaatttttgtatttttagtagagacaggtatttaccatgttggccaggctggtctcaaactcctgacctcaggtgatctgccggccttggcctaccaaagtgctaggattacaggcatgagccactgtgcctggccagaactctttttttcggtttgtttttgagacggagtctcactctgtcactaggctggagtgcagtggtacaatctcggcttactgtaacctccgcctcctgggttcaagcaattctacctcaacctcccgagtagctgggactacaggcatgcgccaccacgtctagctaatttttatatttttagtagagatggggtttcaccacgttggccaggatagtctcgatctcttgacctggtgatccacccatctcagcctcccaaagtgctgggattacaggcgtgaggcattgtgcctggccaggacattttagttgaatgaaattgagacctatcagagagtttttatcacatgcataacttcatctgactgaacctcttagaaggactactctgagaagagtcaaaaccctaatctgtaaggccatacaagtgtaagggccagaattgaagctgattttcttcctaagttttatgctatgtcccctctggctctaaatgttctggagcaatgaaaggctatttcaagtctttttcctttcaatatggtctagtagtttctgtctttgctctgacatgagaagtctcaatagacattttatagtattgttttcacaattcaaaaaataataatgaatatcagttaatattgatgaggcataaggttttactatttgccttgcactgaactaagattataaatgtaccttctcattcaatccccacaatgaagctctgaggcagtcgtacaactgtgatcctgctgtgcagacaaggatctgagacttggcaagtttcctcactcaccctgattcccagggaactcaaccacttaaaaattacccagaagacctgccttgggataggaataacccttcaagccactcctcactgaaaagtctgcaagtccgtaagacagggaaccaagtcacacacttctttttagtaacctctgttcctgggacagtgtcctgcacatagaaaatatcaacatatttatgttgaatgattgatttatgttaagaacaacttctagccatgttaaaacagatctcagaagcaccacatatttccttagaaggtcattctaattccattacaatccacagagcagtgtgttcaatatggaattcctagatgccatgagataatgaaatttcaagtgggtaatgaatttacttttgccaacccactaacgcatactaggtggactcaaatcacaactcagccactcccttccataagttatttacccaatctgggcctcattttcttcacttgtatatagaaatactactaaggttgctgtgattattaaatgatccgatgaatgcaatttatctatacaatgggctggacacagtggctcatgtctctaatccctgcactttgggagattgagatgggtggatcacttaaggccaggagtttgagacaagcctggccaacatggcaaaacccagtctctgataaaaatacataaattagccaggtatggtggcacctgcctgtaatctcagctacttggaaggctgaggcacaagaatcgcttgaacctgggaggcagaagctgcagtgagccgagatcgtgccacgacactccagcctggatgcgacagagtaagactctctttaaaaagaaaaacaaaaaccacaatgcctcgtctattgtaggtgctcaagaaatgttaccttttattacagggtaagtttagaatttcttttcttagcccagagatgctgaagtagatttgagtcagacagaggtaaactttgctgggagacagaaaatccactgtcttctaggccttcagaaatatgtgctataaaggtgctgtatgatggtgtagcatctgccacttgccagtttctgtagtgtaaatacctccaccatgttcaatttcaagttaccaaggtgatgtcacttaacgtggagttgggaagatgtgtgcacaattgactctcaccgactctgttccaactactccattcaccactattttccctccatgctggcctcctttttccagctcggaatgtgccatcagcccaacaggtacaggcttagtcccctctttgctccatatagagacttatctttactacctgcataaacgaggtgattcttactttatttttaaaagcatttataaaatgctccagtctaggcacttcacatatattaactcatttgctcatcctttgagattatgagactattactcctacttgatggaagaagaaaccgaaagccaaagaggttaagtaacttgcctagggtcacacagctagtaaatggcagagccaaaattcaaattaagtggcttggctctgagttcattctcatatccactctcctggccagacacagaactgtggtgggtctgagccaggtcattgcccagaaagaaaagctagagaatcctactggtcactctcaaacccctttgctgggctaggaccagcctagcagtatttttgctgcatgtttcctacttctgtaaactcattctattctgagttggttgtatgccagtcagcattagcaggagcctagaaagtgcctcattctcttctccttttggggaacttatctgatcactgtatcaatcctcctctatgagtacaggagtgaagacactgcggggagccagcagccaagtgctgcactgtgacaagagagcctggggtgcctgggactgaggctctttgataaatattgcttttgcatttcccatagaaggtgcaattcccaagtcttcctgagctcgcctttcataggccggagcagcacccctgctacgtctgggactaggtttccaaaggttgttctggcagccagagcacaacagctgctcagcaatgagatgatcccgcagccccagaggaggaggggtacggtgagccctgctgccctgtgccaagcccagcacccaccagctgcctctcttctgcttccattggagcaggaaagcattaaccctatcagcaccagtgggcaaaggcttggaagaggagcagggtttctggaggttaagttgcttgtaatcacatagctaggagctcagattcatccacacccttttcactcctagaatgtttaacttttgttctgtcttctctggtcatgaagccactctgctgagcattcttttctcatcttgtttcgatactattcttccttttcttttagccagcagcctgcaagccatagtcatttgcaatgcagtctaaccagtaagttataaaaaaagaaaaaaacacacataatagcaagttaagtggattctaacatttagaggaatctataatgattagaaagccccttattatgtcacttctctatcttcacatggagtcattagcattcttggccaccacaaagcatgagcagaaactcagtgaaactcctgctgcttgacagagagaggaatgcttcatcccagatattcatactataccaaaggatggaatggagacttctggattcctacctccgagatccagtgcgacataagccatttggggcggggcctggatccctaaggacaagaagcttttaagccaagcagaaaacaaacaaaacaaaacacaacacagacacagatgcagacatgaataaataaagcagacaaatccacatatgggaaggctccccatcctgttcccgggaggcaggctccctgaggccttacagatgtcggagcagaatctacttacatgttccaaattgtgcatacccagtgcccactgttactctcagaaaattggagtggaaaaggagaaacatctttcacttgaaaaacaaaagacgtcccccacccaaataccaacatggctgtgatttcaccatcattacactgagatttgccccagtggggctttttaataattattccagctgttggctgagttgagaatttgcacagcctcagtggaggtataaccaggctggcctggtcccgggccataaagagaagtgacataagactaaattacctagtgggtttgggggaagtggggaaagagacagataattaatcaggaatcgacaagatgtcttcaaaaacctgtgtctcggcctttatgaagtccttgttcacacaatcttggagaatatacatttataaatataagcagcactgatttttcaaataattgccagctgttagttttctaaaattaattgcaatttttaatggcaaaaaaattaggtttatttggtaggaaaataggaagtttttttttttttttgagacggaatctcgctctgttgcccaggctgtagtgcagtggcataatctcagctcactgtaacctccacctcccaggttcaagtgattctcctgcctcagcctcttgagtagctgggattacaggtgcatgccatcacatccagctaatttttgtatttttagtagagacggggtttcaccatgttggccaggctggtctcgaactcctgacctcatgctccacccaccttggcctcccaaagtgctgggattacaggcatgaaccaccacacccagccaaaaaaaggaagtttataaaagagaaaaatatatttttctgcacaatgatgatttgatatttgtgttttccattgagtttgtatgtatgtgaacatatactgtaaataattgtaaatgcaatttgtattctatatttcattgcctttttcattcattttacttcacagtttacatatttttcacctatttggagtcttcagagtgaccagtgtttaattgatacatatttttccagttagtgaaaattccaccattccagccattctcttgtaatcaaatttttaggttctgtccgtgaaccatatgttcttatgaattcaagttttggttctggtgaattattttcttgggacaaattccattgagaaaaatgactgaataaaataaaactaattctgtgacttttgttacatgttgtcatgctgcttcccataaaggcttgcatgggttttaaagcaaggtcaccataagaataaatagacaaaacttataaaaattttgtcagctctggacatcactgtttttttaaatttgtttttattttaggcacatttaaaatcttctccagttcttactctttatgatatcgaatatgatactcattaaaataattttttaaaaaaacaactttcattacattttactctaggaaaacaaatccactttattttagaaattccaaagaattccatccagatacaatgtaattcataccaagctggaagagggtgcttgaaattaaagactatattttctggtagggtggggcgtaatgccacttgttaaaagataattgctgtgttgtaaaacgtcagctaggcacttctgaagaacagaccccttaatctgaagagaccgggcgtggttctctaaatgtggaaacattttcaaaaaaaatcaacaaaagaacatctctctggctgcttggggttgctttctcaaaggcagactatgattctggcaagataatgagacttagagttttagggccccggatactctatatacataccaccattaaagctactgcttcttctgctaataatattaataataataatagttactctagagagataagaaaaacccaaagtgtttttttcctattcacattcaccactcaacacaacacttctgatattagatgtgtggagttctggggggaaaaatacatcaaccaagcaattttgcatagactcccaagtgggtgtcttctaattcaagtcaattttgacactatatacccagagataccatcaaatcccacaagcgtgggctcagtcagtcccacaagattgatccccacttcagattccagtcacacatagtaggttttcacctatatttctgacccatcagctataagttgggggttcgttcccatgacccccttctcaggcttggttaatttgctagagcaactctcagaactcagggaaacatttgacttatgtttacacatttgttataaaagctattagaaaggatacaggtgagcaaccagatgggagggatgcacagggagaggtctagaagaagggacatggctcccccatcccctctctaggtgccaccctctaggcacctccatgtgtccaggtatctgggcagctgaaccatagttcagggatttttatggaggcttcaccacacaggcatgatcgactattaagtccatttctagccccttgcctccctctggagaatgggaatggaggctgtaagccccaaacttctaatcctggcttgggctttctgttgaacagcccccatccaggagcccagaaatagtaccctcattagaaagaaaatactcctatcacccagaaaacaccaagggatttaagaactctgtgtcaggaactgggatcaaagacaaaatactagaacaaaagattgtcctagcaccactattgcttaggaaattataagagttttagaagctctatgccaagaactgtagtcagagaccaaatatctatttcttattatattacaatatcatagctaatatttattgagttctcactatatgctaaagagtgtgctaagcactccagtataaatgatctcacttagtcctcataacattattatgctcacttgaagagtgatgaaacaaaagcacataggcttagaaacttgctcgggccacacagcccattcatggacacaaacctaggatatatgaaaataggctttgatttccgcagccacactgtggtttatctcttttggtaaactttcagttaatagctccatttttacttccccagaaacttgtaacaaatccatatgttggggataaggtggagtgccatggtgtcttatacacatcctccatctttattagccaactgtgaacttagcaccagccctgggcatctcaggcgtgtcctctgtcaaaaggagacttcattcacctgggcattccttcagtctctggggcaggttttggctcctttctccatttgaaattatttgacttggtatccaattttaagtttaaagctttcttttcattgactctttcagaaaagccatcggatccctttgcgaaaggaaaaacttctagtggctcaactgagcatacttggtttcttcccaatagcacgtttatgagagtgtcttcctgagagcttcatgataaatactatcatcaaatagtagccaaggactaaggtccaattcaaactctacccttccaccaactggcccacatgagcatatgttcctggtacagcactaaccttagaacaatcatttatctaaccatttatctctctttccatttcctggccataagagtatgagaagtcatgctatatttttaggaaatgttacaaatatatttattagactaaggaagttcttgaataaagccatcacaacttatgttggatgaaaatgtaagagaacatgtcaaatatatcaagttcaatacacttttagttttgttttgtttcattctttttccagataaatgaaaatttagaaatttattacatcagagctacaattcaagggcctgtggaagataacttttcccaccaagtgcttatttcagtcaaatgtacatgaccataacattatactttaaaaggccaaagaaaaaataacttaatttcctcgtaccagtatttttcaatatggggtcagtgcagcaaaattcattgggtatctggctaagtgccaattcctggtcttattccaggcatatcaaagcagaatttctggaatggaggcttaagaaccttagattttgtttcccttagttaatcttattgaccattattcactgctctagcatctcccctcatgttgcaggctcagaggaactgcatacaaaactcaagtgccagaaacaatggaagctgacctggtatcaatgcttctcctaaaatgtgggaagatttctgccccactctaggcccttctgtctttccaacactttctgtaaaattcacgtaagtcaggagaatttctgagtagattaactatgacacaaaagacttctaggtggccgaacctaccatagaataaatgattttatgaaacattttatgaatgatctcaaacacccctgctgatcctctctaggaatgaaaatgaagggatgataagaatttaaccagtagtcctgagagaaccactgctgacagagagatgcagggtggaagagaggttagataaaattttaaaaacacctgcctgactctgtggaaggaacagcaagtcacttctaatccctggagttatgctgcctcatagggaagtagagttggattttaaatgagaattttatgagacattcttgatctcatatattctatactaggacccctttattgtactaaggcctattaggtcatgggtaccaattatttgtttagaaaacatcaccacagtaattacaagagatccttgagctctttgatttgttcgggctttgttttagagggatgcgaggcaagaacattattgtaattccttaagtgagaaatcctgcctttcttctatgcatctagtttccaatcccattgtaaggatgtgaaataatcaaaatcaacagcacctttgattagtcactcatttatccttgaattcactcatttgccaaattcttattgattacctcctatatggatcacaaaaattctcctcattgttggggaaaaaaatgtaaccaacaggtgcagtccctgcctacatggagcgtatggtctgaagagggagtatataagtaaataggcaaatttaatatggaatgagtgctatgataggattaagtctcaatgaaagggagccaactatgagaacaaagaaagggagagctagagacaggagacttgtcaggggtctttggcaaccatccaggtgagagtggcaccagtgagcatgaagaaccattgatttcctttgatgtttttttgctcatttttctttctaaatattggagattaggcagagcctaatcactcacctctgttaatggcttctaaccaattaatcagtgtacataagccagatgtgaaccaaaatacatcatgcgctagtaaagctgggcttcctctctttcactccagtttgaacttatccactcagctctagggcaggcagtcaaaaacagaaggagtcttctaaagaggagtcacatccaaccctgtattatggccacagttttccatgccccctgtgttcatgcaccttggttgtgtcctcatagaagactctgggcttggccttacattctgcattgaccaacaggatgtgcaggaaatgacattggatctgcacgcagccgcaggaagacttgtgctcttttttttaacactcctttgaaacctcaggtactttgtaaagaagcctgggctacattggtggaggataagaaaccaagaggaaaagagccaagttgtcctatccaaggtcatcccaaccatgtgaaacagtccagccaagatgagaagaggtgtttaccacagttggcaaccaatgtatcagtgagcagagatgaaatcagaagatccatctacttgacccatatacttgtgaatgataaatgctattgttttaagccactgagttttgatgtggtttgtcacacagcaatatctagatgatatatttcctgagatctaagagattcaagatacagagacaagacaaagaagaactggtactgctattttatgactgtaactttgtggcttatattactatggccaagttcccataaggttctctctggtttaatcaaccatcaaaaagaataaaagaaatcagagagagagaggtcacatatttcctctgacacttcttgagccaggatctgaaaaaagtcttacctggaggaagaacttctttcttctgtgtacctaagtcattcaccaccataattgcattcttagtctccttgtgaataacccattaactcagataaaccactctttagtgaatataataaactcatttaagagctgtgcattggctaggacaaaaagaaaaaaaataacaataacacagaaagttaaccaaagcttaactaacagacttttcatcttatttctttatttctctcctaaaacagtacccatgcttgagtgtaacaaaatatatgtaaaaacaagctgtcaggcttctgacacagtagatgcctagaggcaaatatttctgctaaaagttttgatggagccctggggagaggaggaaagggtcccaagctgagagggattggcagctggctgggagcgcaacctgacgctcccttcccatttcacaaagaaggttttgtttggattgtggggcatggtgagtgactccttagcaccatggggttatgctgggtcctgggggaacatctgggctgccatttcaagcaaggctgaaactctatcctggccagagctgctccaatgaatcaggtgtaggtgtatttttccaggatgttcaaaaccacatcttacccagagaaacagggttttgtccatagaagcctcattctaaagggcaagcaatcttccttggtccccatgaagggtatgtttactgaggcttcatgcccaaagaatcaaatccaataactgaaagtatgacctccacacatgcttttcaaagtatgttaggaaccctcaccaataaaatctctattctcactccatgccattcccaccttgtgtttataacacagtttcaaaagatcgatccctcatttggagctgaaaggttgcattttttttattttaagttctgggatacaagtgaagaacatgtatgtttgttacatagatatacatgtgccatggtggtttgctgtgcctatcaacccatcatcttggtttttaagccccacttgcattagctatttgtcctaatgctctccctcccctcgccctccacctcccaactggccccagtgtgtgttgttcccctccctatgtccatgtgttctcattattcaactccaacttatgagtgagaacatgcagtgtttggttttttatttctatattagtttgctgaagatgatgacattcagcttcatccatgtccctgcaaaagacatgatctcattcttttttatggctgcatagtatttcatggtgtatatgtaccacattttctttatccgatctatcactgatgggcatttgggtccgttccgtgtctttgctattgtaaatagtgctgcaataaatatacatatgcaagtgtctttatagtagaaagatttatattcctttgggtaaatacacagtaaagggattgctgggtcaaatggtatttctgattctagatccttgaggaattgtcacaccatcttccacaatggttgaactaatttacattcccaccaaaagtgtaaaagcattcctatttctccacagcctcaccagcagctattgtttcttgactttttaataatcaccattctgaccggcatgagatggtatctcatcatggttttgatttgcatttctctaatatcagttatgttgagctttttttcatatgtttgtcggctgcataaatgtcttcttttgagaaatgtctgttcatatcctttgcccattttttgatggggttgtttgttttttctcgtaaatttgtttgattctggatactagacctttgtcagaggggtagattgcaaaatttttctcccattctgtaggttgcatgttcactctgatgctagtttcttttgctgtgcagaagctctttagtttaattagatcccatttgtcaattttcgcttttgttgcaattgcttttggcatcttcgtcatgaaatctttgcccatgcctatgtcctgaatggtattgcctaggttttcttctagggtttttatggctttggtttttacatttatgtctctaatccatcttgagttaatttttgtataaggtgtgaggaaggggtccagtttcagttttctgaatatggctagccagttttcccagcaccatttattaaatagggaattttttccccattgcttgtttaccaaagatcagatggttgtagatgtgtggtgttatttctgaggtctctgttctgttacattggtctatatgcctgttttggtatcagtaccatgctgttttggttattgtagtcttgtggcatagtttgaagtcaggtagcttgatgcctccagctttgttctttttgcttagaattgtcttggctatacatgctcttttttggtcccctgtgaaatttaaagtagttttttataattctgtgaagactgtcaatggtagtttgatgggaatagcattgaatctataaattactttggccagtatggccattttcatgatattgcttcttcctagttatgaggatggaatgtttttccatttgtttgtgtcctctcttattttcttgagcagtggtttccagctctccttgaagaggtccttcacatctcttgttagctctattcctaggtattttattctctttgtggcaatcgtgaatgggagttcactcacgatttggctctctgcttgtctattgttggtgaataggtatccttgtgatttttgcacattgattttgtatcctgagactacactgaagctgcttatcagcttaaggagttttttggctgagactatggagttttctaaatatagaaacaggtcatctgcaaatagagacaatttgacttcctctcttcctatttaaacactttttctcttgccttattggcctggccagaacttccaatactatgttgaataggagtagtgagagaggttatccttgtcttgtgccagttttttaagggaatgcttccagctcttgcccattcagtatgatattggctgtgggttgccataaatagctcttattattttgagatatattccatcaatacttagtttattgagagcttttaacatgaagccatgttgaattttattgaaggccttttctgcatctattgagatgattatggggtttttgtcactggttctgtttatgtgatggattacatttattgatttgcatatattgaaccagccttgcatcccagggatgaagccaacttgattatggtgaataagctttttgatgtggtggtagattcagtttgccagtattttattgaggatttttgcatcaatgttcatcagggatattggcctgaagtgttcatttttgttgttgtgtctctgccaggttttggtatcaggatgaagctggcctcataaaatgagttagggaagattccttctttttctattgattggatagtttcagaagaaatggtaccagtttctctttgtacctctggctgaattcaactgtgaatctctctggtcctgggcttttctttagttggtaggatattaattactgcctcaatttcagaacttgttatttgtctattcaggtatttgacttcttcctggtttagtgtgggagggtgtatgtgtccatgaatgtatctatttcttctagattttctagtttatttgcatagaggtgtttatagtattctctgattgtagtttgtatttctatggtgtcagtggcgatatcccctttatcattgtttattgtgtttatttgattcttctctcttttcttgtttattagtctagctagcaatctatctattttgttaattttttcaaaaaaccaacttcagggttcatttattttttgaaggattttttgtgtctctgtctccttcggttctgctctaatcttagctatttcttgtcttctgctagcttttggatttgtttgctcttgcttctctagctcttttaattgtaatgttagggaattgatttgagatagttctagctttcttatgtgagcatttaatgctacaaatttccctcttaacactgctttagctctgtcccagagattctggtatgttgtctctttgttctcattgatttcaaagaacttcttgatttcctccttaatttcatcatttacctaggagtcattcaggagcaggttgttcaatttccatgtagttgtgtggttttgagtgagtttctcaatccgagttctaattttactgcactgtggtctgagagattgtttgttatgatttcagttcttttgcatttgctaaggagtgttttacttccaattatgtggtcaattttagaataagtgccatgtggcactgagaagaaagtatattctgttgactttgggtggagaggtctgtagaaatctactaggttcacttgatccagagctgagttcaagtcctgaatatcttcgttaattttctctcttgttgatctgtctaatattgacagtggggtgtaaaagtctcccactattattgtgtgagagtctaagtctctttgtaggtctctaagaatttgctttatgaatctgggttctcctgaattgagtgtatgcatatttaggatagttagctatttttgttgaattgatccctttaccattatataatgctcttctttgtcttttttgatctttgttggttaaagtctgttttgtcagagactaggattacaacccctgcttttttttttttgctttccacttgcttggtatattttccttcatctctttattttgagcctatgtgtatctttgcacatgagatgggtctcctgaatacaacacactgatgggtcttcactctttatctaattttccagtctgtgtcttttaattggggcatttatcccatttacatttcaggttaatattgttatgtgtgaacttgattctgtcatcatgatgctatctggttattttgcacactagttgatgcattttcttcatgctgttgttggtctttatattttggtgtgttttttcagtggctgctaccagcttttcctttccatatttagtgcttccttcaggagctctcgcaaggcaggcctggtggtgacaaaattccttagcatttgtttatctggagaagattttatttttcctttgcttatgaagcttagtttggttgaatatgaaattctgggttgaaaattcttttctttaagaattttgaatattggccaccactcacttctgacttagagtttctgctgagatgtctgcagttagtctgatgggcttccctttgtaggttacctggcctttctctctggctgcccttaacattttttccttcatttcaaccttggaaaatctgaggattaggtttcttggggttgatcttctcgtggagtatcttagtggtgttctctgtatttcctgaagttgaatttggcctatcttgctatgttggggaagttcttctggaaaatatcctgaagtatgttttccaacttggtttcattctccccatctctttcaggtactataatcaatcataggttcggtctttttacatagtctcatacttcttggaggttttgttagttccttttcatttttttttctctaatcttatctgcatgccttatttcagccagatggttttcaaactctgatactctttcttccagttggtcgattcagctatgcttcacgaagttcttgtgctctgtatttcagctccatcagttcatttatgttcctctctaacttggttattctagttagcagctcctgtatccttttatcaaggtttttagcttctttgcattgggttagagcatgttatttcagctcagtggagtctgttattacacagcttctgaagcctccttctgttaattcatctatctcatcttccgtccagttttacgtccttgctgtagaggcattgtgatcatttggaggaaaagaggcactctggccttttgggttttcagtgtttttttcgttgattctttctcagctttatgagtttgtctagtatcaatttttgtggctgctgactcttggatgaagtttttgtggggactttttttgttgaggctgttgttgctttctgtttgttttacttgcaatgtgcaggtccctcttctgtagggctgctgttgttcgctgggggttcacttcagatgctattcatctggctcattcctgcactgggagatgccacaggagaaggttggagaacagcaaagatgattgcccgctccttcctctgggatctctgacctcaaggggcaccaacatgatgctagtaggaatgcttttgtatagggtgtctgaccacccctcttggagggtctcacccagttgggtggcatggggagcaagacctgcttaatgtagcactttgtccctccatggaaggggtgtgctttgctggggggaaacccactcgtctgggctccctggattcctcagaactagcagaaggaaagactaagtctgctggtctgtggagattgctgccacctcttcccctaggggctcaggcccagggagatcagagttctgtccctgagtccctggctgaagttgttaaagttcctgcagggagtccatgctcagtgaggagggatgagtcaggtttagggcctgaagaggcactctgtctgcagtctgccacagctagtgtgttgggctttgggggatacctcttggtactaagcggtccagcctccctggctccagcaggggaaaagcggggcctggagctttagaaatgtctgccgcccttcccctaccctgggagcttagtgtgttaggcagctatcagtctcagtgttggctgttgcccctccctgaaggagctcaaatggcttacacagcaagcagccacagctgtggtgctggtcacccctccccactgggaccttggcaagcttaagcagattctagctgagtcgctgttgagaatctgcatggctccgtggctgggaccctaggccctggtggcatgagctcatgagtgtgatcttctgatccatggattgcacagttctgtggaaaaacctgttttcccaggctaggtagcatgctcactcactgcctctcttgcctgggggctgactgctcccctgccccatgtggctgtcagatgatccactacaccacactggtcttctttcctctctgtggataatgccagccgcttagtcagttctgatgagagaacctggatacctcggttgctggtgcaggatttgcagaccattacggttcttttcaatgggagcctctgatcgcattgcttctagtccgccatcttggccccatccctgtgaactgcatttttaaacacctgtttttttctactccaaggacattttccttaacattgtcagattctccacttcttatgccactttgacattgttctattgctaatagtaacacttctattcttatcagtatatgcatttaaaaatcccttaatatttaaaaaatttttacatggatgagcttaacttgatgctgttgatgaatctgaaaaaacttaaatgttatttctgtattctgtgacatcttaaggttggtagagaaagtgtggttggtaaagaaagtgttttattttattgtaaatttggtaactgattcacagattgagattgatctaggaccacattccggagtcttaatgtgagtcattaagagtggtttattggtggctggaagattggcagcccagggggaaagggccaggacagctgccatggggaagagcaacaaagaggacgatggggagatatcatgtagaatatggacctgcactcatcagcaaagagctccagccagatcttggaatagcaggctaaacacagaccaaagacacagtaactaattgagccttcctgcaaagtataataattgatgtaaaacttgtttaggagtggcaatttatgggaaataccaacataaaactaatttttacaaaacatggaatatggaggtcagattataacatttattggtgaactgattccaattattaacaaaattagaagctcctaggtgtatgcacatctgagtaggtcaattaacatcatacttacctcgtaacctactgtattagatgtctgctatttgctgcccccacatttagttctcttcaagtaatcatagtgtcctgattctactttggggattaacctcttttccattcccgctttcgtaattagatagcgagggactccagcctcaaatgtagatgtgggcttatactggcttaagtcaataagattaatttttttattgttttgtcttgttttaattttttttgagacacagtcttgttctgttgcccaggctggagtggagtggcatgatctctcctcactgcaacctccccctaccaggctcaagccattcccccacctcagcctcccaagtagctgaggacacaggttcacaccaccactaccagctaatttttgtattttttgtagaggcggggtttcaccatgttgcccaaactgatctcaaactcctgagctcagcctcccaaagttctggcattacaggtgtgagctgccacacttggtccagatttttttttttttaatcactgtgattggctcaaagttggagatataacaaaatcactaccaatgaagttctaaggggatatttcatgtgacttctggcaggaaaggacatttcattcacccttccaacaaatattttctgaacaagctgggtgcccagtcatggctaggattaagagatattaatggaaagaaagcacactctctaccctcaaggtactctcaacggaggacacagaactatgagtaaataattagaataactagtgctgtatctggggtatcgatggattgcaataaaagcaaaaagtgagggattatccttagtgttcatgtttgaagaaaagctagatgggaaatcacttcaatatgtagagacatcagcagaaatttccaaaaggatatggtgtgaggcttagggttttctggattcctattggcttcagacactttcttcctggatcttctgatttgtcagatagcttgtgtctgtccttgagagatctccatttctgattaggccaaatgatttattttccagaacttgatttgctaatatgcaaatgtctgggcacccacaaaagaagttgtctcatcatctgaccaatcatgcctgttcaaaagatgaataccggtttttggagccaagatggctgaataggaacagctccggtctacagctcccagcgtgagcgacgcagaagacggtgatttctgcatttccatctgaggtacccagttcatctcactagggagtgccagacagtgggcgcaggtcagtaggtgtgcgcaccatgcgcgagccgaagcagggtgaggcattgcctcacttgggaagcgcaaggggtcagggagttccctttcctagtcaaagaaaggggtgatggacggcacctggaaaatcgggtcactcccacccgaatactgcgcttttccgacgggcttaaaaacagacagccaaatcatgagtgaactcccattcacaattgcttcaaagagaataaaatacctaggaatccaacttacaagggatgtgaaggacctcttcaaggagaactacaaaccaatgctcaaggaaataaaagaggatacaaacaaatggaagaacattccatgctcatgggtaggaagaatcaatatcgtgaaaatggccatactgcccaaggtaatttacagattcaatgccatccccatcgagctaccaatgcctttcttcacagaattggaaaaaactactttaaagttcatatggaaccaaaaaagagcccgcatcaccatgtcactcctaagccaaaagaacaaagctggaggcatcacactacctgacttcaaactatactacaaggctacagtaaccaaaacagcatggtactggtaccaaaacagagatatagatcaatggaacagaacagagccctcagaaataatgccgcatatctacaactatctgatctttgacaaacctgagaaaaacaagcaatggggaaaggattccctatttaatggtgctgggaaaactggctagccatatgtagaaagctgaaactggatcccttccttacaacttatacaaaaatcaattcaagatggattaaagacttaaacgttagacctaaaaccataaaaaccctagaagaaaacctaggcaataccattcaggacataggcatgggcaaggacttcatgtctaaaacaccaaaagcaatggcaacaaaagccaaaattgacaaatgggatctaattaaactaaagagcttctgcacagcaaaagaaactaccatcagagtgaacaggcaacctacaaaatgggagaaaattttcacaacctactcatctgacaaagggctaatatccagaatctacaatgaactcaaacaaatttacaagaaaaaaacaaacaaccccatcaaaaagtgggcgaaggacatgaacagacacttctcaaaagaagacatttatgcagccaaaaaacacatgaaaaaatgctcatcatcactggccatcagagaaatgcaaatcaaaaccacaatgagataccatctcacaccagttagaatggcaatcattaaaaagtcaggaaacaacaggtgctggagaggatgtggagaaataggaacacttttacactgttggagggactgtaaactagttcaaccattgtggaaatcagtgtggcgattcctcagggatctagaactagaaataccatttgacccagccatcccattactgggtatatacccaaaggactataaatcatgctgctataaagacacatgcacacgtatgtttattgcggcattattcacaatagcaaggacttggaaccaacccaaatgtccaacaatgatagactggattacgaaaatgtggcacatatgcaccatggaatactatgcagccataaaaaatgatgaattcatgtcctttgtagggacatggatgaaattggaaatcatcattctcagtaaactatcgcaagaacaaaaaaccaaacaccgcatattctcactcataggtgggaattgaacaatgagatcacatggacacaggaaggggaatatcacactctggggactgttgtggggtggggggaggggggagggatagcattgggagatatacctaatgatagatgacgagttagtgggtgtagcacaccagcatggcacatgtatacatatgtaactaacctgcacaatgtgcacatgtaccctaaaacttaaagtataataaaaaaaattcaaaaaaaaaaaaaagacacttcatgcaacagatgtacaaatcagatactattatccccatttgacagatgaggaaatggactcttcaggcaatattaaataattttattaaagtcacaaaaccaaaaaaaaaaaaaaagatgaataccagggaggatattttaacatctgatgaaaggctactaaatagagataactataagaaataaaaatgaaaattataaagaataatcaagtaataaattaatatataaataccaaaaatctgggaagttttctgagctgacttagaactttaagaaatgctaaaacaattatgaaaagcagaagtgataatattaatgggttcggatgggtagacaataaaatcagaggtgataatattaatggtattgaatgggtagatattagaacctgaaccacaaaaagaaggtgttggaacctaagaaaacacaagttaaccaattttttttcttgattttatggtattcaacaaacatttattgaatgtctaagtgccacgaactggtaactgattccttgaactggcaatcataaactgagctggaaagtagaccactgaaagtaattttttttagtggaaaaccaaaatatcaggccaagataattacactgaactatacattaacaaagaacctttgctgatggggcacagtggctcatccctgtaatcccagcaatttatgaggccaaggcaggaggatcacttgagctcaggagttcaagcctagattgggcaacacagtgagacactgtctctacaaaaaatacaaaaattagctaggcatgagggcacatgcctgtggtccccactacttggagggctgaggcagaaggatctcttgagcctgcaggaggttgagaggctacagtgagctgtgatcctgacactgcactccagcctgggtgacaaagggaaaccctgtctcaaaaaaaataaatagataaaaaacaaaaaagaaagaaaaaagaaaaagaaaaaaagaatttttgctatctacttgagttaggcaacagatttgcattttcaataagttcctgttattgctcattagtaaattatgtcttattttttattataccatctgagtactggaaagatcacattgctatatagggaccttggcagtctctcaattttgcatgtaatatgtttagtgtgtcagagcacgcatgtacatagtatgaaactaagttcattttctatgtatttatcattaaacctcaggttttgaagtcagcaagatccaaactagcattctgcctagcttagttacttgcttaggaaagttatttatattttctgagcttctattgttttgtctcttaagatggaggagcaatacttaaccttcagttattagaatgactaaataaagtttcttcttaaaatatagaacactgtgtttgacacatagtagggcctcaatgagaatttaatgaatgagcaaataaacgaatagataaataatagaaataaaacaagacagaggaataatatgtgtctagatttatttattcatttatttcttggaaaccatttctcaccacagaaaaatgttaggtacattataggcaggatgaatagatgtcttaaaattcatgctatattcttaattctggttaatttattctaatgaaaattatacattaaaatcatcacaaaatataatttaagttgtgtgtcaagctgtactttttcatagtaatgaatttatttttcagggtatgctgtgtgcatatagtttatttacatatttagatatatttcctatttataatcagaatttgaattattgggccagtttttagctaaatagtttatagctaaattgtttcccagtaagttttctagtttttatctatgagagggccaatttgcctgcatcctctttaaattatttcttaggtcaaagggatatcttttccttaacaaaaaatgttttaatagtttacatcaaattcactgaaactatatatcatggctaatgaaacaggctttactaatttttaactacacttcaaaaaatttcttggataagatagttgggttcaattatcatacagaaaatctgtgatagtagcagcaaaattttaaaacaatagacactgatgtcccaactggcaccctaacgactatgaatctttaatacctaccattgtgttaagcttcaagaaatgaggcagagaagaggagggagaagacacagtatttcagtgattctttacaacttgacaaagtgttattatgtcatctttcaaatccataagccattattttgcaccttggggagcaatacagtagtgctccagatcccacagaatcacttatccttaaagtcttcatatacttttctcagtctatccttctctcaagggaaagcaaacttctctagctttgggaacgagtaggtcttaggtgtcagctatcacttctccagaaacaggacacaagataacaagcaaagtgacctttgcaactgtctttctcaaaggaagctgagtcatttttctctaatttggtttaaaaaaaagatgtttttattatatcgagagtaagcaccataacttctcccatggaggaagtttttcttgtgaaaataccttcaagaggcattttggcgtggatgagccggagtgtggtagattgattgcaaaaaatagcacaaacatttcccctccctgtactcatccccttgcaatatgactttgcagctcctcccctcgagacaaaactctatttgtccaccattaaatctaaactggttttgtgacttcctttggcaatagaatgtggtgaaagtgacaatctaccactccgaggctaggtctcaaaggcttcttcatgcattgtgctggctctcttgaaaccctgttctgctatgtggatcagtccaggctactctgctggaggaggtgcaacccatgacccaagcatgtgcatttccatagccagtattcagccaaccattccattgaggccattctagattagccaactcctacctgactgcgaaagtgagcaaagccagctgggatcagctgagcccaacctagagacatgcaactcacaaatagattagtgaccaacaataagggtttattttaaagtccctgaaatttggcatggtttattactcagcattaactaacagatacactcacaagcaggaatagcagtaagtatcaggatatcaaagactgtgggaagctactctacagtagcaacaggggaatcatgttggctgttgctgatagttgctcaaggtggcataaagaaaagagatgaggatgagaaggggagaagatctaacaaaatggggagtatatgtgattatatttggggggcccagggactgttaacagtgacaggacggccaaaaggtatgtaagaatgatgagttattgtgttgccagaaagtgagcatccactccactttgccttctgtgtttttaacacaatatatgtaactgattaatgcagcacaagaatagatagagatcctgtccttgtttgtgaaaactaaagagagggctgatcatttctactgggtaaagtgatgtgatacaaagatagcatgcttggacataagaccctacaatgctgagccacctggaggaatatgactctccatttccatcccctcacacggaattcacaaggaatactgaagagtgttaagacttccacagaccattgaacccattaggtgggaagaagggaggttgagtcatgtttagcttcctctccagtggaacagagatctgcagctggcatctgaatagcattcctctcatgtaaagggtggagggaatgtgtcaacaccaactgaacacctaagccttatctcatgtaattctgacaactgcacaaagaaattatttgttatccggattatgcttaaaaggaaactaagtttcagagacattaaggagcatactaaatttcactcagttggtgagtgataaacagtattttaaatccaagattgcctgaccctggcccaataatctttcgattccaccacaactgccagaaacatctatccacacatcaggtgtatccacagctgtttggtttgttgttgctgaaatttaagtataacacctcccttagcaactgaaaaggcccttagctacctgcaatatttaacaactactttctacataaatagcttctgaaggttttatcttacagcatagtgggttcatgacagcttttatctgagatgatgaaacaacaaaaatgcctggactatgacctagagcctgcccgggaggtggttggtcaggtgtagtctcttgggaagtgctggggacacagatgttccagatggttgagacatttctttcactagagcatggagtgtagaattagccaaaatacccaacctctaggaaggaaatacagatgttctaaaattgtggtatccaactcttacttttcagatttctaggattcaacagaggttcctgagaggccattgcaaatgtcagggggaaaagtaattcaattaacaacaacaacgataacaacatagcttataattgaatatcaccaggcagtgttctaagaattttgtgtaaattaacacatttaatcatgtttttatccttatgggctacatataacattatcaatagcctcattttacagatgagtaaactaagacaaagaggggttaaggaaattactcaaggttttgcagtaagtggtccaactagaattttttcacaggcagttttgtttcattgaccatgctcctactcaccataacgtactatttttcaggcagagaaagtgtttatttttttaattgcacacacacacacatacacacagacacacactcacacacacacacgcacacacacaccttacatcttcatgggattagtacattggaccagcaggactcacaggatgcaataccaaagcaacttcatttcccccgtaattgctcactcaaacctgtgccatggatcagacctttccctaaccctggatgaactcctgggcagaaaagaccacacagcttccagattccctctgaaataaccaaagaaactccaggcattttagttgcctaaaatagtgtctgttcactgatgaatatcccgagtccagtgtaatatttgaaattctgagtttcactcaaagttaaagcctgtcccttcacttgaacctgcaataggttggaaatccactgatggggaaagagggactttgtcttttctactctgttgtctccttccatcccctaccacagcctggtgttgacttcgaacctcctggttgaagccaggagagaaaagaggtggaggcttaaaaataccttaattgatgagcacccatatacagatcgtttcatattacattgcaattgtgaaggtatttcaaaatgttgtttacacttatcaatgttttaaaattatgaaaataatgatagttattaggactgatgctaaatctggttatttaatgttataaaaattttgaaatattttgataactctacttaaagaggattcctttggcaattctatggatttaatttatgtacttaaaaacagtaacctaagaaggggtcatctattgccaaagactgctgagagagtttatagcataaaagcaccttggttttgggggtttcttctccaccatataatgtctcaactgttgtcctatctcccttccagacaaccttcttgggtaaagtccctttaaggtgataagggccagttctcttcctcctgctcatatggctgacatctccatgggaaacatgcacctttaccagtgcttggcagaagtgcaggtactctgtaaccccagcagcccctactccatccgctgttcaggtctgctagttaactggtatgccctagtagggcgaactggctttgcatgtttgaagtcctcttgtaacaattggtaaataacttctgctctgagctcccgtcaaatcctctgccaatacccttgcctcctcagcctcttcccaggacctccagacctcccactattcaggaacctaaaagaaaatacttggcaaagccagaccctgcaagagctgactccaaatgcacaaatgatttcagttctcatttgtcagtgctcgggcctcactagttgttggaaccctgtgaaacatccgcactattcattacatccaaaggaagcaatctaactccctaattgggtttttccagcctctctcactagacttgaggcaaggggaccacatcccctacccaccccttcttggaatggcagtaggaaaaatactccaacacattttcccaaagaaattctctctttaatctagcacctcaatctttttatacctttcatgtggcttttgaaccttatatattgagggtccgtattaaatgttcattcactgaaattactgctgacaatcaatccctacacaccacacacacacacacacaccacacacacacacacacctaaatgtgcttggctataagaatttcccatgcagcagactattgaactacagatttttcagcattggcatttggaaaaggctcaaacctgaaggcagagaaaactaatagcctaaggcctccaatctaaagatagattctactaatcctaggctggctgccttgtacagctttgcaatgtctcctccacatgtgagcctggcccgcttgcctctcctgtttctacattctcagttccttggctggctcccccagggataactctcagtgcctgcctgatctgtgttacaaagcagacatgaatagccaggccagagagccatgtactaatttcctgggtggccaatccctctctctcatatcctagtgccattttaagggaaaagaaatgtaggacatggaataaacagagggaaacctgcttgatttgttgttaatgtgtcagtgttttgttttgtgggtttaacttgtagaaggcaggtctttgtcttgttactctctggcatttaacagggcctgccttcagtgactcagccgggtttccttagacagaaaacagccacttagtgccttttacaccaccaagaaaatgagattattccttgaggagatcagcagctctcggctgctgtcgaaagggcgctttgcctgtttgtttggctgaaaggcaccacgcagcccaggcttgtttaaaattagcttcctcataaatcacttgcacaatgaagtgtctgcctctgccctctgacatatttgtgtctctgtttatttttaatgatgacatggctttttctgtttccatttggctctttactctccacactcccaagcactaacttctgtggcaaaagtacaaaatctaagaaactgcagggaagaaagagttccttttctaccagcacataaatgtagtggggaaactgagttagccttgggggtatttctggaggaaattgcctcctttctaactttgtcagattataatatcctgaaattgtactttttgaaagagtaagagggtgatggcaatattctgtaacttgataggggtctgtgttacacacgtgtatgtgtttgcaaaactcaataaatgtatatgtaccttacatgtaagtttttacataaagaaaaaagtaaactaataatgaactctaataatatttatacagaactatttaagaagaagtatactagttttctcaatttactttgaaatgcatccaaaactgtgataaattaattgatggatagatggacagacgtgataaaacaagtagaaaaaaaatgttaaaggcaaaatatagatggtaggtacaagtctgttccctgcaaaattacttcaactttgctgcaagtttgaatatttttacaataaattattagaataaatgctctcttggtgacccacactgaatccttggaaacatcagagagccacagcttctaaaatcctgtattccacccaaattttatttttaaaaatctatatttatatagagttaaattgcaataatttatgacaacaaggaaaacagtatccttgacccagtaaaaagtacaaaatacagaatattctaagagagagggaaattttattagttagacacataagaaccttcttcaatttaaatggcatgtaactagaagttcttaatgcagctctctaatccaatatataaaacacaaatgaagaacagtaaagggcatacaatgaccaaaacccacataggatgaattcaaatgggcctggggtgagaaagtccaaccttagtgaacccacagttactgttgaaacaaacaaacaaacaaacgaatacccagaaaagtctgaaacaaggaaaaaaactggagaattcttctatgaatgctacctttttgaggcaaggtcttttctttctttctttctttctttttttttttttttctgagacagagtgtcactcagtctcccaagctggagtgcagtggctcgatctcggctcactacaacctccgcctcccgggttcaagtgattctcctgcctcagcctcccgagtagctgagactacaggcgtccgtcaccatgcctggctaatttttgtatttttagtaaagacagggtttcaccatattggccaggctggtctcgaactcctgaccttgtgatccacccgcctcagcctcgcaaagtgctgggattacaggtgtgagccatagcacccagctggtgagacaaagtatttttattttcttattacaacttttggagactttgacttccagaaaacaaccagataattagaaaagaagagctcttagcacatattgccatggtacactgaaaaattacactgctttggcaagaatgtggacaggaaaactcatggtaacagtatattgcagaggtagtagtttgttgtgcatttcttttcttcagaatggcagttggagttgaaaaagccacctctgcagcagagctcaataatatgaaagttgattattttccaatatgatattggaagttgttctagttattgtacaattaacctgtcttctggggaagggaaatatactcctcccgtggaagagagtaaggaaatgaacaataagctaataaaccttaatatctaaatgagtttcttttcacaaatgaagaccatgtacccttattgacaaacaccagctcttgataaatgtccagtttactcattcatggatgagtaaactgaaaaatattttaaaatatatttaattggctataaaatacacctacaaagtaatcttcaaagacaagtcttaaaaatgacataagaaaaagtaaaaggatcagacaaaactccaaatcatgcaaaaacagtctgcatttgaggtggtaaataaagaattaacactacttgaacttaagatgtgaacataaagtacaatttgaaaagttctcaaaaaacattgatgagaaagacaaagggagggagagaaacaggatacaaaccatagacttgaatgtattccgcaggaagtacccaaactgaaaggaaacaacaaaaataaataaataaataaagtcagagaaaaggtctgagagcacattgccaaggagtcaatagcatttcagggaagttagtgaagaggagccaagtgtggttccctgcacagcagccatgcaaaatgagttcaaaggttaagaaaatgaggattggaaagttttgttagcttgaccaaagcctagatctagaatgggatctcaggaattttattatcagaatcataaatcagaaatatcaagtctgtaatattatttgaaaatgctgaagtgccacaagtgaccattttgagactgaactcctcaaagttgtcacctctctctgaaactcattgtgctttaatattcttgccccattgccagggaacaactaaataacttcctttgctttatttcattcatccatttctccttacaagcagcattaatgttgtgctgccttattggacactttaacatagatccctgtccaaaaaaagcacaaatttcagtagtgtaggtaaacaacttcaacataacatatggagtacagagggagagagagaaaaaacatgagagtctgcaagaaattatcatttgtgttttatagtattttttctcttatagtttacccacatatttatcattttcatagttctttttgcttcttacatgtcttacctttcatccgggaatattttataattcccattggtagcatctgctagtgttaaactgtctttgttgattttgatgataaaatgactttattttacttttattcttgaaagttatttatctgggcattaaactacaggacgggagttttttgttgttgttttccttttttttttttagcacattgtatctattttttgtttccattgtaattgagaagtcaactgtcagtaaatgctatttgtttgaaagtaatctctcctcttttctctgcctcctcttaaaatttttctctttgtactgggttctctttagaatcactatgatatgcctgaaagattttttaatatcatttgatatttttgggttttctgaatgtgtgaattagtgtctttcatcagctatgaaatcttttacacccttacctcttcaaacattacgtctgcttcactttctctcttcttttgctttcggtgtttttatttcttatatgttagaatctctatatgtctccgccatatttgtactgttcaatatattagtccctagccacatgggggtatataaagttaaacttaactaagtaaaattaaataaaatttaacagtcagtttttcaatctcaatagccacatatcaagtacccaacagctgcatgtgtatagtggctactgaattggacagcacagatacagaatgtttttattattgcagaaatttctattgcactgatctatatctgttaggtgttctggtatattttcaatctttcgtttattcttcatttctgatttttcttagatttttgaccaatctttttgttcaatagttctctatcaactcttcctaatttgctgttaatttgatctttttagttattttactttaattctagaatgtatattttgttaattttttaatctatgatatcacattttatggttgctggttccctgccaacattttaaatcttgactttcatctcattgtatatagtgagcacagttgttacatagtctgcctggtaattctattttttggacttcattgtgtttgctcctatactgtattatttttgctgtttttttttttcttatggtatttcaactcttcatgtattcagttatttctgagtatgtgctggacattgtttctaaaaactaactttcagtaataaattcaagacttgattaaagttgtcttccaccaacaaatatattcattgcttttgccagaatcctgggcacactatttttgaccatttaatacaggttcatgctttaggttttctgtagagtagaatgatgcaaaactgtcatcttaactaccagacttcaacccttaaagtttcagtccaaagtgttagtgtcctctcaagatcctcctcccaaatgtacagaagctgctaatgacagaaaagaagaaatatataggaaacatcaaacaatggagaaaagtatcaaaaacaaaagctcattcttcagaattattaataaaacagtcccttgagagactggccaaagaaagagaaggcacaagttgaactataaaaacttgcacaaataagaaataaaagaaattgatttaaaatcttgacatagtcaagaaatacaataaattgataatatattaaaattttataataaaaataacattgaattatgaaataatagaaactacaaaatgccaataattaattaatctataccttttcaccctataaaatagttttataaagggctaactacactttcaaaaaacaaaaattcttattttctaaaaccattgtacataatataaagaaatgtcctttaacaaattttctgaaaataatgtagcctttatatcaaaaaccagaaaaaagacagcataagaaagtatatattagtcaatattaggtagaaacatggatgaaaatatcagttattaacaaaatacttctcatatccatcaaactcacataaattaaatttctagcaactcccagtgccactgaagttatagggtatctggaacattcatctattcccaataggagtttaaacagtacaaccatttttgggagtgatttggaaatatccactagagtaatgcccagtaatagtggaatggattgataacttgtgtgtattaatataatggcatactatatacctgttaccatttatgcacaatttctttttgactcaacatacacacatttcaaaaatgcaaaatcaagtaaataaaccaaggtgccgaagaacattaaaaaattatactatttgtgcaaatttaaaaaacacacaagacacaatacaatatgctgtgtgtgtgtgtgtagatatatagagcatatttatacatcaactgtagaaaggcaattgtctcctgggaaggagactaggaaaggagatcaagaagggatacaatggggacatgaagtctgtctgaaaagaaatatttaaaaatgatttgaagcaaccaaggctcaatataagcattttaatatttaggtagacagtgtttattaggtataatattagaccttactttataaagtaactgtgaggactaagtgaattaatgcatataaaaggcttaaaggacagagtaggtgctcattacatgctgattttcataattgttactcattagagatggtgaatttctagacagaaaagcccagctattatttatcactgtcccttatgcatactacaggatctagcacagaggagatgctcagtaatttggttgaatgtgtccacacatcataaattgctgtcttcatctcaaactccctaatggtccttgcctacttgcatggatgtaggtgaatgaggagtgtaacagattggcataaaccactggtagaaacgttagggcttagtatttgactcttacaaccagttccatatgtgacctggtttatggtttcagggcaagtgattacttttaagtaaccaaccagcagagtttagacgtgtttcgagattcttggaagaaggttgattacataaatgccaactatattagtattgatttctcaaagaataaaaagaaaaaccaaaaaaaaggtcaactcaatcagctatttattatttcttctgttctttaaaattgtaagaatttctgaggggtgggaatttcaaagctatttcaagatcattatataaagcattctttagtatataaggtcttaaggaggagaaatgggctttggctgacttcacccacaagctgaactccataaatattatatagttaacacacgatccagatactttaacttcacagagttcaggaaagaacagcttttgtttatggtgagttttcctatgtgttgaatataaagtaccaattaaagtgtaatcggaatagctgtttgaatttttggcagcgtatcagaaggagttacggaaagcagggccttttcaatgatagatatgattttgcagaggtcatgctatggcctggatagggcatgcctggcctgatttcaaaccataaatgcatgcgaatgtaaggaaatgaatcctattccagggcctatatcttcattgccttagaaatggtttttctatttccaaagcaattctggttttcagaataatttgcctggaactcaatccctatatgctgatgagaccaactgaggtctagaatggctaagacactggggcattttattttgttatttccactgtccaattctttgtagattttgatttggaaaagtattcaacccattggaacctaaaccattctccctctccctaaaatattttcatagaactgagttccccttattttcagagttcttacatcaattatacatgaagtgaatgcctgaaaggatcaggactgattgtggggaagaagtgaagtatgttacggaataaaagactggaaacagaaaataagtagaaaacagaaaaagcaatgaagcaaacatgcatggttgacataaacgtggagcagaaactacaacaataggttcttggatagtgcctctgaatgggacaaatagtcactctggagtctcagtaaaaatctaaagagagaaacctgatccaagttaaaggtatagtcagcgactagctcaacttctaacagcttccaaaaaccaaaaatgtgcagttgaccttgtaactaggattgcatatggcacccagccaaaacccgccagccctctccagggcaaagagtgacagctttgctgtcctgcagttgaaacaagtgggagctcatattaaactgtgccaagcagggcctgccactaagctgaacacctgtaattcacccatctgtgtccctcaagtcctcaccccaaagtaaattgattctgagctctaacagctgtctgggggactctgctgggctgttcccagcaggaaaggatgtgggagatgataaaagctgtaggtgtgtttccaaggtcagaacccaaagagggaagtttttttgattctttcatttgtagagatgacaaaagtggtagtgggtgggatgcataatttccagatcatttaagtaactaccagacgttgtttatcccatcatatgatttgaaaattaagataatcatagttgatgaaagaggagaaagcctgggcaatgagggtccctttcatcaaggagtgtaaagcaaagagtaggagaaatggggtacaaacttagaaaatgaaagtcatatgcagtgtctctgtaaaggtaagagaatttcaggaatattttaaacatacattcagtgtagactaccctgttcatatcaatgatagaaaaatagatatgtaagttttatgagcaacaaattcaagtttggaagaaagaaacatacacatatggtcacctgctatgggtatttataatattagatgtaaagtgtttataacagcagactcttgccaacatcagcagccattgacataaatagattaccgtagattactagaaataaatgaaacccttgtattctatataggtgatattccaaaagtaaacagaatcttaaaggctgaatagcccaggctcccttgtgacttgagccatagccacactttttttttttgcaagcttacatactattttgtttctggaattttttaaatgcttttgagtaaagagccttgtttattgttcagataactgttttatctgctattactaaatagggaatcttcatttattcattaccagtcacacatttattaattttgtttaaaactatttattgtcctggtccttgggatatagtgataagtaagagcattagtctctgcttgcaggctcatactcaacaagtggtgactttcaatgtacttttgtgtttatgcacacatgggaaaactagaagcaatagattgcgtctaaagcaaaatgctaagaaaagagcttctaactgaaggcatctctatgagaagtttgactgaattcagctgatttccataatcacaaacacctactgaataactacctatgctttgtctttggtgagccacaaaagtgctgagattcattcatagggccccattctaaatgggatcagcctagtgggaaaagactctgcagtcctcttagaatgtgccatcaatttttccttcatctgtgtgcaattgagttgtccagcacatacatttaagtgcctataagatattaactacattgctaggcagtgggaataaagagtgctgttagtctctgtccattcatctgcacatctatcctttcacccattcatccaattcagatatttaatgaatgatgatcatgtactaagtgtttatgctagactgtggagaaaaaataaaacaacatagacacactttatgacctcatggagcttacattacagaagcagacataaacaaaacataagaaaaacaactagatatacatgaaattgacaaattctggtatttggagagatttctatttttagaactataaatctcaagaagttctgagagaccctcctgctataaaatgaacagtctatgaaggcaaatattttagagaaaatgctgattccacaattattaggaaagatgccagaggcaccccccagtttccctcccctacacacagacacagacacacacacacacacacacacacacacacacacacacacacacagcaaacaaacaagaaataaaggaaccaacaacaaatatgagttggtcctagaacagctttgaaatgaggaatctaaaggtaccagaatcagaatgctgggggttgatattgccgaggctgggcagctggatttaaaaatattttataacttttcgtaatttttctctacatggcctagtaaagagaagaatgccctgggcattctgttgataccccacaaggacgactactcaagaattagggtttgagatgattcagctcttacaaagactgatcttcgtgaatggactgtttgctctctgcttggattaaggtgatttttccctaacctaaatgcctaccaggtacacaattagatcttctctagaagaatataaagccatgcagagccttaattattacactttttcaaactcaatatccattatttaataaaatataattactgggcatatagggatagaaggacaaataactaatgatcaagacagagagagagaaagaaagagactagaagcagaccaataggagagccaaatattggaattaatagataacaaatttaaaaatgattatgatcaataaatacaggaaattaattggtaagattgatgcacaaaatacacataggacatggtgaaaatgtcagacactcttgaatccagttggagttccagaaaaggaggagatgcaacacatgacaaagcagtaagaaaaaaaaaacaaacaaaaaacactctcaacaaacacacaaacacacacacattttaaagtgtacattgaatacttaccaaaatagattataaaatctttctcaattttttaaaaattgagatcttagagcacgttctttagccacaataaaattaaactaaaaatcaataacagaaagctttccagaaaatactcaaatatgtttttccatttgtttgtgtcctctcttatttccttgagcagtgttttgcagtcctccttgaacaggtccttcacatcccttgtaagctgcattcctaggtattttattctctttgtagcaattgtgaatgggagttcattcatgatttggctctctgcttgtctattattggtgtataggaatacttgtgatttttgcacactgattctgtatcctgagactttgctgaagtttcttatcagcttaaggagatttttggttgagatgatagggttttctaaatacaaaatcatgtcatcttcaaacagaaaatttgacttcctatttgtatagcctgtatttctttctcttgcctgattgtctcgcccagaacttccaatactatgttgaataggagtgatgagagagagcatcctgtcttatgacggttttcaaagggagtgcttccagcttttgcctattcagtatatgatattggctaaaatattacatcctcatggataggaagaatcaatatggtgaaaatggccatactgcctaaagtaatttatagattcaacgctattcccatcaaactaccactgacattcttcacagaattagaaaatactgctttaaatttcatatggaatgaaaaaagagccaatatagccaagacaatcctaagcaaaaagaacaaagctggaggcatcatgctacctgactttaaactacactgcaaggctacagtaaccaaaacagcatgatactggtatcaaaacagatatatagaccaaggaaacagaacagagacctcagaaataacaccacacatctacaaccatctgatctttgacaaacctgacaaaaacaaggaatggggaaagaattccctatttaatcaatggtactgggaaaactggctagccatatgcagaaaactgaaactggagggcttccttacaccttttacaaaaattaacccaagatggattaaagacttaaatgtaaaacccaaaaccatacaaaccctagaagaaaacctaggcaataccattcaggacataggcatgggcaaagactacatgacaaaaacaccaaaagcaattgcaacaaaagccaaaattgacaaatgggatctaattaaagagcttctgcacagcaaaataaactagcatcagagtgaacaggcagcctacagaatgggagaaaatgtttgcaatctacccgtctaacaaaggtctaatatccagaatctacaaggaacttacacaaatttataagaaaaaaaacaaacaatcccatttaaaagtgggcagaaggtatggacagacacttctcaaaagaagacatttattcagtcgatgaacatgaaaaaagctcaacataacggatcatttgagcaatgcaaatcaaaaccacagtgagatacaatctcaagccagtcagaatggtgattattaaaaagtcaagaaacaatagatgctggtgaggctgtggagaaataggaaaacacctttacacttttggtgggaatagaaattagtccaaccattgtggaagacagtgtggcaagtcctcaatgatcaagaaccagaaataccatttgacccagcaattccattaatgggtgtatatccaaaggaatataaattattctactataaagacacatgtacatgtatgtttactgcagcattatttacaatagcaaagacatcaaatgacaatcagagatagtctggataaagataatgtgatatatatatatatatatatatatatatatatcatggaatactgtgaatatttggaatataaattattctactataaagacacatgtacatatatgtttattgcagcactatttacaatagcaaagacccaaatgcccatcaatgatagactggataaagataatgtggtacatatacaccatggaatactacacagccataaaaaagaatgagatcatgtcctttgcaaggagatggatgaagccggaagccatcatcttcagcaaactaacacagaaacagaaaaccaaacattacatgttctcactcataagtgggagttgaacagtgagaacacacaggataaaacaaggaagattaaaatatattttaaactgaataataacaaagacacatcatttcaaatgctcacagaacatccaccaatatagattatatattatatataatgagttcataacaattctcagtaagtttaaaatatttgaaattttacatagtatgttctctaacacaacagtattaaaaaattaatagcacagagatttctgaaaaaatcactaaatatttgaaatgtaaatattatacttctaaatacatggttcaagtaaaaagcagcataaaacataacatatattttgaattaaatgatactgaaaacacagaatgacaaaatttgtgggatgtaactaaatctgtactagagggaaattcatagcttcaacttcttatactagcaaagaaaaaaaaggattttaatttcagtgatctggttaagtgttaagaaacatctagaggttacaacactcttcatggtgaaatataagggcatacccctctaaccacctacatgcaacgtaatcctggagagcctatccatgagactccacatagaaaactctaaaaaaatttttttaaatactaaaacctacaagtgaatttagtgacattgtaggatacaaagtcaatacacacaaatcaatagtattttacataatagctgaggacacatggaaacaaaatttaagaccacaccagtcacaatagcttcaagaagaatgtaatattgagaagaaaattgacaaaatatgtgcaaaccctatatactgaaaaacactaaataaatcttggtggatattaaggctaaatttttttagatgccagttttactcaagttgatctagagattcaacacaatcccattcaaaatctccacatggctattttacagatatttaaaattttattttttaatttatatggaaagttaaagaatagccaaagcactgttgtaaaagaataacaaagttggagagctacttaatacattatttgatttctagatttactataaaaatagttatcaagatggcatgatattgatgtaagcatagatatgtaaatcaatagaagaatagtgagcccagaaatatattaacacatgtgagctaaacagatttttgacaatgataccaaggtgatttaatgggggaaatgatagttgttcaaaaaatggtgctgaaataacatccacatgaaaataaatctcaaattttacttcatcctctgtgtaaaatcactcaaaatggatcatatacctatataaaacctaaaactacaaaagttttaaaagagaatacaagataaaatctttaagtacttgaatttggcaaaaatttctttgatagaaaatggtttacgctaactataaaagaaaataaaatgataaactggacttataaaaattagacttcttttcagaaagtgccattgaaagataatgaaaaggcaaaggtacagactggaagaaaatgtctgtaacatatatatctgagaaagacagagtgaggagtacaaaaaattaactggggaggagagacatgctagagaacaagaatttgctgaacactttttatgtatctgatactgtacttaactttgtttttaaagataaactattggagcttagagaagctttcccaaagtgtgacaactaaggtattcagtctttccttccattctttaacagatgagtctcccttggtcttactaaaatattactaataagggaacaagttggtcctttagtgtttttttaaggaagactagaggataggaagctgggcatggctacatgtgagatcacgaagacacttatagaaatccttttccttcttattctgtccctgaaaccatatgcatttatagtggtttttattcttcctgatttattttgaggtctaccctaagctgtaagccctaggataagtctattcaatctataaaatctaactagagttggtaattttttttttttgagaccaagtatcactctatcgcccaggctggagtgcagcaacgtgatctcggttcactgcaacctctgcctctggggttcaaatgattctcctgcctcagcctcctgagtagctgggattacagtgcctggcaccactcctgactaacttttgtatttttagtagagacaggttttagccatgttggccaggctgtacagccaataatttaatactagataatgtttaaccactatatttgaattttaccattaatttccacttttcccttttaaatctaaggtgtgactccataacaatagatttcagtcttgtctttcatccttgctactggaagtgtgaaccatggcccaatagcattggcatcacctgggagcttattagaaatgggaaagtcaggacccaccctacacctacttcatcagaatcttcagtttaattaggtctcagcttattcaaatacacattaaaatttgggaaccctgctgtttatgaccacatagaaaaacaggaaacaggattgcttcctgctcctgtaactacaaaggtatgaaagcacatccttgggatgtctagactatagtctaccactctactggactttactgcttgcggaccatgtagaaaactttagacaggtcgtttagcatctctcagtctcaatttcctaactataaacaggatgagtacattgtcttcatagacttgctgtgaggattaaatgagataacattcataaaatacccaaggcaaatgctgacacggtgttggttttcaatatatgcagtcttttcaagtggtcaataaagaatgattctattttgcatgaaataaataacaaaagtcagtgccttaaagccaatgcaaacccttgacatttcctcacatcaaggagcaggatcatttgcctctttctctatgtgttatttttttctttgtgcaatggtctcagtctatgagtgggggcaggcagtgctaggaagagccattgccttttagattgtgacctccccccatccatgtccccaaacggcctacttaataacaagagcagtaacggggttcattatgcatgcagctctgcaatcattgctgaggagaaaattagtttgatgccctgagcgacagttgaactctagaaagtgcctaaataaaataaaagacaaggaaaatatatacatacacataaatataataaagagtgcagtgagaaaagttatgaagaggccaatttcaaaacttgcccttttcctggtgcttcttgattttttaggaatggtgtgttggttactaaaaagtctgtttatttaaccaaaagttgccttgtctctagcattgtgcaggtccatgggaggtctgggaggctcaagcatgtacacacatgcatatcttaaaacaacacagatgaatctggaagccatcatcctcagcaaactaacacaggaacagaaaacaaaacacctcatgttctcactcataagtgggagttgaacaatgagaacacatggacacagggaggggaacaacacacaccaaggccagtagggggatgggggctgatgggaggaagagcattagggcaaacagccaatgcatgcgaggctttaaacctagatgatgggttgataagtgcagcaaaccaccatggctcacctatgcctacataacaaacctacacgttctgcacttgtataccggaattaaataataataatcatcatcataatcgtaggttgccttctatgaattgttaaaaaaaagattgttttgccattatttttggtttacagaagagttgcaaaggaagtgtagtgttgtcatacagccttcacctagcttctaatgttaacatcttctataaccacagtaaatttatcaaaactaagacattaacattcatgtacactattaactaagtgtaataggcattctttggatctcccctctttggtttttctggacctggatctaatccaagacatattgcatttagtaatgtatgcttagtcttctccagtctagaagagtttctgtctttccttgaatttcatgaccttaatgcttttgaaaagtaccagtctgatattttgtataatgtccttaattttgagtttatctgatgttttctcatgaacagactgaggttattaatttgggggaatgaataccacagaggtcatgtacccttctgatatagtttggatgtgagtccctgcccaaatcttgtattagaatataatccccagtgttggaggtggggcctggtggaagtgaccggatcataggggcagatttctcatgagtgatttagcaccagcccccttggtattgtcctaggaggacatgagtgacttatcctgagatctggtcatttaaaaatgtgtaacacctctccttctctctcttgctcctgctctggccatgtgatatgcctgctccccctttgccttccactatgattgcgttccttgaggcctccccagaagctgagcagatgccagaatcatgcttcctgtacaacttgcagaactatgagccaattaaatctcttctctttataaattatccagtctcatgtatttccttatagcaatgtgagaatggcctaatacatcatctcatcacatcttatcagtggcacgtgatattaaaatgtcttattactggtgatattaactttgattatgtagttaatgaatgtctccaaattcccttctgtaaagttattatttccccctttctctaccctgttattaatatttataagaaggttactaagtctagttcacagttaaagggaggggaagggagatgggaggtgtagtgagacacaagacctcttataaagacaagatgcatgtttcagaaatcattagctcaccaagaggccatgacaggatggacttctattcaggagtaaaagaaaataagtcatagagttgataaacacatgatttggtgagggcttccatttaggcaaagttgttgcccttcaatgattgtgacttttttctcctttcttctaagattttttgtgattgttttaaccttctggtgaattatcatggtgatagcagcatttttgccttgtgcaatgctttaaatggtataatgtacacacacacacacacacacacacacattcgtatatataatccctcctatctttttttcctagtttttccttttgctttgaaaaccatacacttctccagcatactgttactactacttaaaaagtatcttagccatttctttttttaacttttaacttttaaattcaggggtacaagctcaggatttttacttaggtaaacatgtcatgggggtttgttgtacagattatttcatcacccaggtattaaccctagtacccattagttgtttgtttcccaatcctctccctcctcccatcctccaccctctgaaaggtcccagtgtgtgttgttcccctctgtgtgtccatgtgttctcatcatttagctcgcacttataaatgacaacatgcagtatttggttttctgttcctgcgttagtttgctaaggataatggccattatcttagccatttgaaaataatgatttaacctctctcaccttcattgtcattttagaagaaactaccatttggtgtcctgctgagacaaggtatgtagttcgcttttatttttctttctttatgtacatgtagaaacaaacatacagttctaagttttgaaaattaaaggtttagggacatatttgtgttactttaacattaattttatattacatatctttgcaaaatgctgaaatttgcacttattttagccaggtagaaaaaaataggaatggatttttaaaaactgtttttggtgctttactgaaagttgttttccccctttcacctttatttgatatgaattttgtcccttaaccaaaaggaagcacatttttcaaattttcttctcttcccatactttggctccttgcaaccaagaacagcataattttctatatttttttattttacaaagaattatcttttcctttagggtaaagcaactgctttcattcattaaaaagaaaagcaaaaataaataaaacacatttttaaaaagcaaacaaaaaagtacacagcttattcttgtaaaaactttatcgacatggctattttctcttctagcgtttcaggttttagattaaaagcctcagattagacaaatttttgttcctcccaagatgccaacatatttgtatttatatattttaaaaattcttgtaagttttattattttctgccaaaatgattttagcatttaaaaatccttatcattaaaaaggtaaagaatatagaccattaattctattatttttatgtacttctcagtaaatctctgcaatttaccaatacagtttctcccccatattatggaaatgtctcttattacgaatgtggttattgtctttcttttcattttcctaatctttccaagactctttcctcaggagaacctattatttctattttaggtctctattctttgttcattctaaaattttctttcttgccatttttatctcattgttctcctactttttattctcagatgttttctcaaaatatcctcctcgctactgattcaacatccctacaatctcaattatactcttctctgtgctcgatgtgaatattgctgggattttaaaaatgttcactaatccttaattcagtttatctctaaaaatgtgtgtgtgggtgagtgtagggaaatgtagggaaaagaaataattaaggaacacacactgtctccttaattatttcttttctctacatttaagggtcatatctttctacatatttgagtataatagtttcttaaaattttcttttgaatactgcaattactgacagtagcttactttttttgagatttctgaaacttatctttcctatctattgagccttgtaagttctctttacacgtatgtttatgtctatatctacttgtctatctgtgtatctatctttgtagagagaaagacttggacaagttacttgcaaggaagttattggacagttttttttgtgaaatattgtctattttcatctttgaaaatgtgataactgatattatatatatgaactttaaaaaattaatataggcattaaaatggtttcacattcattattggaatttctttaataaattgcctgttgatgtattttcctattttttctcttgaggcattcataattttatagttaattttcaaaccttctttgcttaccaagaatattaatactttttctggaaaatgcctagcaaagactttttgtccatttaaaaatgttccactgtttcctgttatttatgacttaatgacatttcagaactttaatacactaatatccataaatctcttcctttttccttagaaaatattttcacaactcaagacaagttaaatatccacttatgggaacagtgctgaaggcctggactaggatggtagcaatggagacagactaaaggtcagcataacagtcaacattaagggggttgaatcaacagcacatagtacctgattggaaatacagagtaaattacagtgagaagtgagttgctgtccagatttctatcttggatatgtagacagatgatggtcagcaagcaagaaaacaggcagaacaattttagaaactaagaaaatgtatttccaatggaactaattaaatcagagtctgtaaatagcattgtaagatataggaggctgatatggtttggatttgtgtccctgcctaaatctcatgtcaaattatatctccaatgttggagaagaggcctagtggggggtaattggatcatggagctggattttccctttgctgttctcatgacagtgggttctcatgagatctggttgtttaaaagtgtgtagcacctcccccttctgtcttttcctcctgctctgaccatgcaagatgtgactgcttctcctttcaccatgattgaaagtttcctgaggcgcccccagccatgctttctgtacagcccatggaactgtcagccaattaaacctctttttaaaataaattaccctgtttcagatatttatcagtgcatgaacggactaatacagaggcagaagcacatctgcaggcagaaatggggaaaaaaataatatcagaagaaaggataagaggaagagcttaagaataagtatgtgcaaattttagttgatgctggactggggagaggtgctaatggattcagatcctgggggaatctggacaaggatatggtccagagatcaatgggaggagaagaaaattaataaacttgacttaaggactagcctctaagttgagaaatgtaatgtttatgctaatatttttacagaaaaaggtgttatcattctcagttttgcaacctgattcagagaagctaagccatagaccccaagccacatggactacatggtggcatctatttaaattcatatttatttgttcttagcacttttgttgtggtcgctatgctacctctaagtaggactttgacttcctacaaaattcactgttacacatccaggtagatgtgaatacatgctgcagtaatgtctgtcacccatagtcactgcaggggaagttggcatcacagcactgacgatatgcctactatctttaggttaaagtggatacgttatcattaccctatgcaaaagaatctgatcattgccctgaagataattttgttatctcacattgcatatgtgatcattaccctgagggcagagatgcaatcattggcctataggaatacttatcattatggcttggcaagtggaaaagtgataattaacttgcacgaatagatgggatcattgcactacagatagatctgttattgcatttcctgaagaaatgcaatctctagtgtgcaaaagacaatgtgttatctacatttatggtagagatatgctccttatattgcccataatgatgatatcaattgcatttcaggtggaaattaggattgttgcattgctgataaccttgttataattacgttacagaaagagatgcaatcattcccttgcatatggtccgtatgaagacgggatcattacaggaaaggtgaaggagatacagtcattatgctctatatacacccatttttatggctagcggctgaagatgggatgctttctttgctggaagacctattacctgttaggttgcaaaagatgtgatcatcttcctaaacaataatttagagtcccataacaattttaagtgtgctgttcatgaaaatttgaatacattgtattgggaatataatggaagtgagatgcctcatgtcgtgagaaaatctgacataaactccttaagcatgagaggccatgtgggtatggaagccctgaaagggaggaaaaaacagccagaccctagctgttccagtcatcccaactgaggtgccagacttgtgattgaggccatcttgcatcatctaggcctagtagagctgccaactgactgcagacacatgagtcaatccagctaatgccacatggagcagagacaagccgcccagctgagcccagtccagatgacagaatcatgagcaaataaggttgttgttcttttaagccactaaattttcgggtgatttgttacacagtaataaataactgaaacaactatgtacagtttaatgatctgaaatcaatccatagtgttatgatagcctttttaacaaaattgaaatgataacttattcatttacaatgcaaatcaatttaatggcaatagttacaactgccctgaaatgatctaaagcctcatgaagttgatttaatatctagctacccaacatacttaatcacatgttcacagttgatgaatagtgactgaatctccatgagcaagataatagtaaagctctttttttctctttctctttttttccagatgaataattttacatttacactgataaaaagttaaagttgcagctctgttttcacactacctgagggatctttgtagattacataaaccctaagcctcctgtgtaagttaaggaaaaaaattccaaactcacagtgttatcgagaggattaaataacataatttatgcaaagtcttaaccatagttgctagcatttaaactttaacttttgtccatgtctctaatgtaatttaaaatgatcttactctttaaggtttgatctaatagaatatttgtcagacacaaagaccaagatttgtcccagttgatgaaccctgggtataactcaatagcatattggcagtttttattttctgttaagtctggatccattcaattagtgatttatttcttaatttgtcaaacattacattaacaaagtaacaacttttctatccatattatattgtggttacaaaaaatggatcaattatatttgaattaaaaaatttaattgccaccaaagaagagaaaaataactagagaaaaataaaagagatgtgtcaagaaggaataaagaggctgataacatgagatctcttctagctttgaaacatgtcttgtgaaatgactaaaattttaaaagctaggatcaagtattggtgaggagatgaagtaattctaagtctcatccattgctaatggggtatacattggtttaaccagtttggaggactgtttggtaatgtccaaatatttattaaagttaaacctactcctaagtcttatagcccagaaatttcaaacctaggtaaatacctaagagaaataagagtacatgtcttccaaaagatctatacaagaatgtgtatagcagccatagtcataactccctaaaactggaaatgacccaaatgtccataaaaagggaaatggatacatgtatcattacatatttatctaatgaattgctatgtcgctgtaagaatgagcaacccactgatacatgccacagtatcatgaatcacatagacagtatgctgcctgaaataagccaaaataaaaaatgtcttatttcacttatatgaagttctagaatatgtaaacgtgatttatgatgacagaaattaaaatagcagttccctttgcatagggggagcgtattcattacggaagtgtatgataaaacattgtacattggtggaatgttctatatcttcacttgagtgtttaccaggatatatgtccacaaaaaagttaggaatccatacttaagatttgtgccctttataatatgtgtgttatacagccactgaaaataaattgatagataaaaagtaatgtcttctaggttccatatggagaggactgatgaagccagcattaggcgtgatggggacgtgcataaatgtgtatgttatccactgagacacagattctgaagcaccagaacattaaaggcacttctacttgtttcttctacccagctgaaaggacagaaagcttcttccacagagccaggacagtccaggggaacgtagtccttcgactgaaagctatgcttcctattttctaacaaagaggctaggtcatgttgaccacccagttttggcctgcctggcttgctttttattccagcctggaggactttcagggttgaatatccactcaagccaaatcccaagaagcataacctgctattagactcttgtcacttatcgggtgaggggctgtgcggctgttccagtgcttccccacttgggtcttgtgacataccctggggccaagccaagccctggaggttagcttctacagtctgtccttaaagagagctcagggatgtctggacaggacctggagacagtgccctgggccagagacctctgatctctaggccagcagagtcaccatgcagacagatttatgagccttaggcaaaacagctggcattcctgtggccatctttctaccccttcctttccacatgaccatatccttggccagatcttcatgtccttagatggctgttgcctttgggtaaattggcaattaagataaatgagcatatttatcatggccttgtggttacccctcctgaagctctcagggtggcaagctgcctgaccctcctactatgaacttagtaactttaaaacagagagtatcttttcttgcccagctgaaatttcctccccaggcgacctacttttaggattaatatgcgggaaagtctgcagttttgttttcagtgagggtagttgtgttttcaaggaaagaggtagcgccttacagtcagattagccagctttatttctttcatcaaccctttactggctttctaaattttttcaagtaacttcacctctctgagtttcatttacctcattaccttcatcaggtaagatgacatatgaaaagcccttctcaagcaactgcaaagttccaattaatagaagaaattgtaatgactatctgtgtttgaagcggggccatttttcttatttggaattttcacgtattaaaaatatggatcctttacacctgtatgcctttactctccaaattgattcattctctagttcctctatctcattactaagttcaaataatcatcttcctacaaatcactcagtttagatgccttgaaggcttctttgaatacttgctcctgttcacacccgacagtcagtcatcaagccctgtggaacttgtccctggtcaacatccgttcttctccattcctactgccgttcaccacacgcaggccctcattgtcccctcctgggatctatatcctctcctcagcacctttttcttctctattgataccatagacaacttctcatctcatattctctaaactcaactttcaggatatcatactcttattccatagatcagaactttcaatgactttctccttctttacagctcttcataacaactctgaagatagattcagtccttctttttggaattgcctcttatttctttttctttttatgcccatcataaacctcccattggcaaaattaccatgaacattttcttgtgaattcattgccttggttcattggttcatggacgggcaccaccatgagccaattagaatctttccctgagaatctagaatcatggttaagaaggtatagatctgcctgatgctttgttgaatgaagaaaatataatgtcccaagggtggcagccatttttctgccctatgaacttcaaaatgcagaaaatctatctggaatgtgaaagaagaaggatatcaatgtaaaaacaagaacaatatagataagtagagagagaagagagagtgactccccattctgcttttttctgaggccttaatttttttttatttgtcattggtctgctaagataagttatcccccccgcttttttttttttaggagacgactcactctgttgccaggctggaatgcaatgccacaatctcggctcaccacaatctccacttccagggtttaagcgattcccttgcttcagcctcctgagtagctgggactgcaggcatgcaccaccatgtccagctaattttttgtatttttagtagagatggagtttcaccatgttggccaggatggtctccatctcttgacctcgtgatcttcctgcctcagcctcccaaagtgctgggattacaggtgtgagccaccatgcctgggcaccctttttaatttaacaacctggagttagatttctatatttgtgacactgggagtcctacttgttttaggacctacataccaactgtcatttactgaaatgatatttagccatacattttttcccatctgattataaaacaaaaatcacaaatctagagaagtttgctccaatattctaaaatgcttggaacatacataataatataattgaaactcccttccctcttggcttttctgaccttgaactctcctcttttctgactcctcagcccagcaccaccccttcctttcccttctttgcctctcctttttctactcatcttccaaaagtaagtaatgttctgcaaactgaccttggacttattctcttgtctatttgcaagttctcccttagtgtctcatcatttcctggcttcaactattattttcaggtaaccatctcctcatctttacatcctaacttcttttactgccccattctaacactaccaactcttcgctagacatacccacttggattctcctcctgcttctcaatctgaaaatgcctaaatcagtggttttcaactgggggtgattttgttccccagggacatttgacaattctggagacattttcttattatcacaactggggttggagatcctcctagcatccagtgagtagaggccagtgatgttgctaaccatcgtaaaagaacagaagagcctcttacaacaaagaattatctggccaacagttctgaagctgagaagctctgctctgaaacaaatctcaccatgccctccctgtatttcctctatggcctaaatctgatcattttcctgtgtcctcttgcctgttagtgacaccttcaacctctaaatcacccagaccataaatttcagtaggtcttgttcaactatttgtcaaggatgatttataaagtatgcttacagtgggaaaaaaataaagtaaatattacttctaaaatactttctatatctaggagtgtttgattgtatcaatcttaaatataaatattataaaattagacaagaatacatttaaacatataagaaaataaaacatttaatttcaaataccttatctatcaaatagattctggttaaagcaactaatcttctactctttagaaaaacaaacttattgggaccactcatatattgctgcaattttcctgcacattaaattaaggggagcatggtacaacttctgatgaggatggcaagcctgtctagtactctaacattggaatatgggctttataagcttcttatatgtgttttgaaagggcaacccaaagaaaatgcaaagaaaaaggggatggtcaacagataaagtttttatcaatttctctggggaagaaagtagcttcctatgaagctaattccctgcatagcatttattcctgtctgatgtttgtttattgttaatttacctgtttgttttttgttgctttccactagaatgcaagacccacgaattcaggggacttatatactttgttagctgttacatctccagatttaaacctatgctttttattaggcattctatttgttgaccaaaggaatggattaatgaatacatgcttgaataagtatgtgacttatatgaggtccagtgagtgtccacatgacaagagcttctgctcagggtccagatctatctaaagatagtggaaagggcatgggacttgactcaataattcatctaaagctgttacttttacagttagatgtttcagaattcaaatttcaggttttccctgttaggtatgtgactttgagagaattatttatcattcattcatttatttaggcagtagtcattgcttgagttcctaatttatgccaggtcctaggctagactctggaaattagtggcagagatggccaacagaaacctgtcctcaaggaactccctactaattggagagacagccattaaatgtattcataagggaatgcattgctttgaaggggagaaatcacaggatagtatgggattacatataggggatatgggaggagctacgtatgtctggtgggttttctgtatctatgcttattaatctataaaataaaggtcatacaaacttcctcagtggtgtttttgtaaagataaactatgaaatgatctggagcccatattggttgcaggaaagcgacttagtaaatattggatccattctttcttattcccgctgagcacaggagcagctttgggaactgcaacctggggctggtgcgacccaagcacatagcaatgaaactcatctaggccttttcttccttctagaatagtgacaacagatgtgagaagcctaatcagctgattgctccataaaatcataagggctgcaggtctgctccacatggttgaatcgaaggcttctcaattctgccactttcattttttggtccctcttcctgaaattacttaagttttctactcttacctgaaatgctcacagttgggtgtgatgagtccttgtatatgcaatctatctggctttctagaggtcatagaggtcatagcaggctctagattattcctttagtcacatcttcttgacctggcaagctaaggattagctcgtgagccctctttaagaggaggggctcatctgggttcaccgagattgcaggaggcaaagtgctgtagggcaccacctcattctagtgctacgcattgtaactggctgacctctcagagaccacactgcggccgtggaaatctgccttttgtaagatgccctgagaaactggagaatattagagaggaatgaatataaaagcagtaaacacaacaagcctttgttgaacttagtaattgccatcactgggttagatgagcaaggagaaggtttatgaagctgtgtaggcatggttttaatcatatgaggccagatcgattaggcctggcatctcagtctgaacagatgaaagggggtgtgataaaacccacatttgtaggaggtacctcattgggatggtcaaatctttcttacgtgccctatgaacatgggcaagttacttaccccctctacatctcagcttccttacttgtgaaataaagatggtaatagctatcacgtagggaacagagatcacgtgccaacactgtgcctagaacctcacctgcatcagcatgtatcacactcctaatcatcctgtgaggtaggcagattaggtgtctatgttttacagataagcaaattgagtgtctaaatggctaaataactcttccaaagttacacaaacggtaaactgaagagttaggataggagtctggctaatataatgccaaatccattctataaattactgaatcataatgatcttatagagtccatgtgatgatttaatgagatgttaaatgtaaatagctgctcagaagtaatttttagctgctattgttgtggttattttcattagcatcaccatcacaatcagataattgtggaaagtttcttacttagattcagaagtacagattatacaacagcattaagtgtagaataaaggaaaggagatcctattcatcagcaaggatgtagcgaaggaaagtttaaaatattgactgtacaaggtccaacttctctgatgggcttgggcccacaattcacctaagctgagattttttcatgataggaagctgctgctaattatttgcatacagtgcagcacaagaacctgcccctgaagtcatgtcactctagtatttagcagcttctttatgggaaagatattttatattaataccttgggaaaagtagttacagcacatctctcagagataaaataccaaagcaacactcacttccatcttgcataagttattgcaacaatgatgctgtgtaacaaacaaacacaaaacacaatggcataccacaataagtgtttattgttcatgtgtctgaagtgatcagctaaataaatctggcattcttggatttatgcgtctgaggattggttgtctgcctatctaggctagcctcctttgagatatctggaatggcttgggtctgtgtctcatccttctcctggaactagcaggctagtctaggcagatccttgctgatgacaaaggctcaagaaagcaagcaggcatgtgtaagaccacttgaggaagtagaaatccaacagttctacttccttcacttagctaaaggaagttacatgggcaaacccaaaagcaagagatagagttgacctgttgactttaaggaactttggtgaaaggaactgcaaagtcatacagaaaaaaagagtggttataggaataagtgaaaaatcaaataatgtcattatctgcccatatcttttcttaaaaacggaatccatatgtgtttgaattttattaaaggagccccacccatatcattagtctagttttatctccaagataaatatataacacattcagcaaatgggttgaagtcagggtcaggtttgttcctgtttattgtctcacccaagatgagcaccaaggagttcagttgttctcacatgtctgtgtgttgctgggccttgtttctttaacaattaattcgttatgagaacagagcttaatccaccctctttactctcacaatgtgtgtgtgggtgtggatgtgggtgggtgtgcgtgtgttaactagcctgtgaaagactgactttttcctagagtcatcagccttgagggtgactctgagaggtcctcggtttatactggaggtagtagagtgaagtggttgattatacaggctcggaaatgaaaccagccaggattcaaatctcaactcttatgtcttaaatatgagatatgtacttagttactgtaatttcatggattttaagcttctttataaaaagagtaaaacttctaattcagagagatgttgtaggactaaacaagatattatgttttgaaagccttttgcagtgtttgcaaaacatatagtaaactgtcttgttcggtcttgttaataccgaatattttaaagcatatgattttaataataaatgagtgttattggttatggtctcattatcatcatccattcatccaaccatccatttcctcgtagatgatctacaggagtcctaatcatttctaagtcacattacacaagatttccttggtcaggaaaaggttttcacttaggacagaccattatctcctttattctctttcctctgaaattgccatgagaagaaaatgccacgaagaaccatgaaaggcttccctcttgtctctgtttctgcaagcactgagaatacatgcttctgagcatcctcataaaacactttataaaaacattcatagatttacagatagaaaataattcaccctggcctcctgaaaactaggtgtcaattactctacactttctccattggatccaaacctcagaaaaattgttgttttaccattttatttgctaaaagtagtgactaaacgaaaaagaaacataggagaatatatttgtgcatttgggttatgcaatagtttcttagatataacaccaaaaagtatgattcataaaattaaaaacataaaaaattggacttcatcaaaatgaaaacattttgctcttctaagaacactattaaaatgaaaatgcaagtcaaagactgggacaaaatatgtgtatatcatgtatctgttaaaggacttgtatccagaacacataaggaactcttacaattcaaaaagaagaaaacaacccaaatttaaaataaccaaaacatttaaatggacattttgccaaacaaaggtacacatggttaataaccacatgaaaacctgcacaacattattagcaattaggaaaataccactccatactcattagaaaagttataatccaaaagactgacaataacaaacatcggtgaagacatagagaagctagaactctcatatatttctagtggaaatgtaaaatgatatagtcatgttggaggaaagagagagaaccctaaatcctaaccaatagacaccatgtaagatatgatacagccattttggaaaacagtttgataattgcttaagaagctaaaattattcttaccttacaaaccagtaattccacttctaggtatacaccccagaaatatgaaaacatgttcacatatagacttgtaagcaacattcaaagcaacatcattcataatagccaaaatgtgagaaaaaatgcaaatgctcatcaaccagtcaacagataaagtgtgatccatacaatggaatactactcagcaataaaaaggacagattattgatacataccacattttgagttagccttatttcactgtgctatgtgaaagaaaccagacataaaaattgcatagtgtaaggttgcatttataagaaattcctagaaaagagaaatctatatgtagaaaaaaacagattagcgattgttggagactggggattagaatggggattgatgacaaataggcacatgtagagtttttaaatgatagaaatgtcctaaaaattggagtgagggatggttgtacaaacgtatacattaatttaaaaacactgaacacaaaattggtggtttttatggtatgtaaattataccttaatgaagcagttttttttttttaaagttaaatgagatctagaactctagtcaggactgtgttaaaactgctaacgttggagttgttttcttcccaaaacaattcaaataatgctgctcgttcctattaggcaatacatatttcatttctagtcagcatgtggtgaggtgatcaccttattattttctttccttctgcatactccagatgcacttttgacttaatatcttcgttgtatcctcttaattaggttcttgctgtttccttgagaccataccttcagtagttcatgcctagtttaaattttatcctccactcagatttaattcaaaccaccacattttaaatgccttatagtttatttctgtgaatgtaagaaacacatccttggcttgcttttacaaattcattactgaagagatggactagaggggccaacgattgattccaagagacaccaattgctctattcccctgcctgataatgagcccatacccagagggaatcggccagtgttaaatctcataatgacaaacagaaatgtgcagcgtcgttatcactaagccaacaccattaaaggccagtgtttattgacacttcaggtgactggatgatgcctctccaggccgagctaatgaggagaacctctccattacctcttatcgagatttagcagactccatagctacccaatgaaagtggaaattactgggcaagcactgacatttaccagagactggccttcagtcataatgcataaggcactcaaggacagatttgtagactcagaaatccagtttatagaggcttttgttttagcctgttgtttgcaaagcctgcaccctcaaacatttttgctgctctccacagtctagtgcaaaagtggttgttttcatggatgtatttcctgccacttgtcttaagcacgaaaaaaagaccaaagcacaaatttgaaagtctttttggttcttgtattctttagaagcccaccatagttgttgttttctgatgggatttattcactcaatcccaatcattcatagaccatctccataaatttgcactttccatctactaccaaattacttgcactttcaagtaattaattaattattttcttaaaccaattcatattttttaaaaaatatttttcagaaaggaaatgtaatcttactaccattaataaaagataagattaaaaatatatttaaataaacacgtaactattaattgctgtttccctaaccaatatactttctaacctaatatattaacagaaccatgttttgctttgtttcgttttgctttgcttgtttccagagtagcaatgtgaacagatataaactacattttccaacctcctttgcagttaggatggccatggatatggtcctgggtgacaagaataaaaagatgatgctcaaaagagattctgggaaaaccataagaggagggtgaggcaactgacatatacctttgcctgtcctcttttttcctgccctgaaaatggtcacagtgttaaagatgaagtggcaattttgggtcaatgaggcaacaagcatgaggttgaaagtcacactcaggtcagaggaatttcaagatatctactgtacaacatggcacctatagttaataacatgctttattcttgatgattgtcaagagagtagattttgagtgctctcaccacataaaaagataagtatgtgaagtaatttatgtttatttgctcaatttgggcattccaaaatgtataaaaatatttcaagagaccatgttttacatgataaatatgtatatatttttttatttgtcaatagaattgttttaaaagatggccaaacagaaatatagtcagaatagggtcttcgattattgtgcaagaaaaaaatgaactctccacttgtttaagcaacttctaaatcaggttttctgttactagaggccagtgtagttctcactgagacatttatctctgtcctacttaaaatcacttcatgtgccaccatcagcatgggcatcacactttgatcaacattctgctcattgaatatggtatgtgtagattgtctttcctgaagatagagatcattttttattttttactcactcccatcaggccagaggtaaatttaggaaggcccaaagtggtctctttcccatctaaatatatatatatattgtgggtgggcagcctctgtattcttcctctaattgaaagagatttaaatgcttatggtgtgaattcaaatttattcaaatatgaatgctcacaatattgacaggccagtccatagccagcccaacatggaaagaggactacaggtgtccatgcagtttgttctaagttatggctgcagctactgcctgtctctgagttttaaggatgatgtctctggtgactccattcttgcttacttatagaataaagcattcagaacaaataagccagtgaccagcgatttatatggccaaaggttctgagcttgctaaatttatattattttactatcctaaacatcaaacatttaagcgtgtatagttcttgctcacagatgagtaatagaaattctttgaaagatactatagattattataatagtaacaataacagctgccactgattaaacttgttctatatgctaagagtatgctctcacatttgatctttaagcaatcccatgggtaactattattgggtatttttttgttattattatctctattttacatttgaggacattgaatcttagagaagtcgaacctcttgcccaagatcacacagtgagtaccatgaacaagaaataaaattcttccctgtgtgaacctaaagccagggcttttaactatggctaactttgatgggtcttaatataaaaatatcttgacatgtttttatgtttgttcatttctattaattatttataattaagttattaaatattgatgtatattcatattttatattaattcaataaaactcttaataaacctctaataacataagccaattaactaagtgaccctgggcaagttatttatttatttatatttaattaacacatatggcctttgtgctagacactgtcctaaggagtctgtaagttttacacatttaattcatatttcaactcaatgagctaagtactccatttatacaagaggaaaccaaggcgtagagagttgaagtaacttggcaaaagtcatacagttataatagacttacatagtcatactagtcatacagctagtcaaacggccagtaatggcaatgcccttatctgcaaaatgagaaggttgtagtgggtaaccccagaactcttgtcacctctggcattctgtaaactgtaaattttgaatttctggcttgattaatgattgattaattgatttttggttgagcatataagaaatatgctgccacagaggaaaactggctttcgtagccctttctgaccacggtgtttctttcagctcagcaaaaggcaacatctgtgtatatgcagagtacatatctataccctcaatgtatttctgacaagttcagcttgtgatccctgtgggcatagctggtaagtaagtttaaaccatcatttcccaaagacagaactgtgatgaaatgattacttcccagacactggagaataccactcctgatgcagtttgggatgtctttgtgatagcctggcaagaatctccagaatcaatcataagagacaagacacagtaacagaagtcagacggcctgacatagtgtttgttgaccataacctgaactggagcctagccattgatcagctttgagaattcggctgtcagtggtttaagcacacatccttaggaagatcagaagcttccctatgtgtgaaaagtaacctttgctggcagagcaatgccataacttactttcctaggaccctcccaatgtgcatagagatgagtggtgggatgctctcttatggagcaagcaattttgttagttactattgatgtgctcagatatttgtagctctagctactaatgagtttcagtaggaatgccagcatgaactcactcagcccagtttatttcagcaatacattactgtgacaggtgatggtgatcctccacctagtttctctttaccagactggtgcccttaacttcgttcttctgggggtgttagctgctcatggctcacacttttatcctcttctggaggattttccacagctgatagggcctgccttgtgcatatacctggaaacttttattccttttcctggaggtggcccattgccagtagggccgatgtaggtgtgcaagagtgtaaccccctttccctgggagtggaaaagtgatgggggagctctctgagtagaattcattctctggttctctctgtggcatcggagtaaggtgaatctccttctggactctttcttttctatcctgttcccctgtagccttacaggtttctcttgaaagcaacccctcaatatgtcacttacacaagaatccagatctatcaagcaagaggaataagttcaagttcataagattcttgtctttaactgctgagccccacccccatccttggcttgtgtccatccaaaatgtcagtactctttgattgcctcctggctcagttaccttcatgttttactttcccctcatatccctttcaaacaatagaagcttctttcactgaacataactgcagctccttcaggagatgggggaagaaggcagtgtcagaagagagactattctgcactccttggagaaccagtgaccagtgggtatgatatttaattttaccaggagcatgcatcagaaaatagtccacaatatttcacacaaagagtcatatccagaacaaggaaattaaataggttttaattgaaaccttaatgctacatttgagaaggaaggtcagattgaaagaaaattgatttctgtaattgataattctttttcccacatatccctgagcacaataatcataactcttaaggaactcagaaatgcatggtatacaagggagtgacatgagtacacttatttcaaaatggagagagagacttcctgcctcaaactatcccagatatttaaagatttgaaacatttaactaaatttttggtaactcaaatgttttgccactcgttagacataaaatttgttttctatcatctgtcagtttcactctacattttatttcatggatgagacagaatgatcattagtagttagttggttgtaaggggaaacataaaataaaaatagaagttcatgggaaggattttccatatgcatctgcatggaaaaaaatttaagcaaaaggatttaacgtgctgatatttcaaactaccttttcataggatgaaatatgatttgcctgtatgtgattctgaaattcagatagtagaaactctacgggcaacgctatctcctctagaagttggtaaaataagaggcaagtcttattaaaaataattataattcttttcaaccaatatttatcggtgactcactcagggtcaaaaaagtaaatattttttaacggtaagaaggtacaaagaacagtatgatgccaaggaacacatgccactttttgatggagaatatgaaagcatcctgggggaagaaagagatgatgcagaccattcagagcaggtaggatttggataggtataaatcgatgttgaaaggaaggggctagcaacaagaaatagaaaggctataggctcattggaaggaaaaggtaggcattgttcaatgaaatgccaaaaaatatttggcacttcggatactatagaggatgcggaaaagtaatctggaatggtaggttggagctatggaaagagaatcaaggtgtttattgtttcagtgaatgtcaaaacatatgagtgtgtatatattggaatagaatgaagagatctcaaaggtggaccatcagttagagtgattgatatggcagtgatctaaaacaacagtccccagactttttgaaccttggaccagtttcatggaagacaatttttccacagtgtggggggatggttttgggataaaactgttccacttcagttagattctcataaggagcgtgcaacctagatccgttgcatgtgctgttacaatagggcttgtgctcctatgagaatctaatgccaccattgatctgacaggaggaggagctcaggtggtactgctcgctggcagctcacctcctgctgtgcagcctggttgctaacaggctgtggaccagtaccagtccacagcctgggggatggggactcctggtctaaaataagtaaaggaggcatgaacacacaggtgacagtggaagtcaaagggaacaagaattttaatagagaagaaaagatcaatgctggcacaaactatagaaggaatgaggaagaggaaggtcaaaccaaagtaaatcgatctggcaaagaggaagtcatttggtcaaccaaagccggtatttaatctatactgtcatactgcggattcctcccaaagccaacctcagcaacagaggttgagtagtggtagtttgtttgagaggtagccctaggaagaacaaggaagggggtcagaacagtgaggcaggaatagcagaagcgaatagaggatacatgaatgaggcagtgagcaaacggagatcctccagagggatccatagaatgtatctagaattgttccactgagggaggggtagagcccagggatttgtgcagtgatttcggctcctaattgcttggcagttgcccgcaggggcatcaaatcccctcttcaatggactggtctgctctgagtagggcaagcccctgtggccctgctcaggtagaaaagcagaaacattcaagccattgaattatgcaaggagtgatccactgcagcctcagataaacttagaggtaagcaagggtataaataacaacttcttcaagtacctacaagttctaggtgtttgcaagtggcttctatttttgaggtcacctcacagtttaagatggctgctggcattccagctatcacagctactttgtggacagcaggaaacactcatagaagagtccacttcgtttaatcagccttcctgtaagtatcacagaacattcattcaccagaaacagacatatgaccaatcttgctggaagggaggctgggagatgcaatattttagctcgacatattattgttccacatacaattgtgcttggttttaaggaaggaaaggtacatagaggttgtgtgatagccagcaatctctgccataccatataaaaacatatttaagtcagagttttaatttcttttttatttattgattctgtgtcccacccactagatttctagttccttgaagacaggaactgggttagctttactgtgttattactcactgtgactcatacattgaggtttatttttttcccccagaacagtctagcccactttatcccttttggctttttaagtaaggacatcagtatcattacacaaattaaagggaagagaggatgaggatgcccaatagccagccataatgagaagtcaggaattccaaaacttgaattttagattttatcaaagaagcaggtggagatgaaaattatgggttatctgatatatttaattattcaaaatcgtaaacaaacgtactacacagaactctttataacaaattcttcatttttcagcatacactcacccaaacataaacctacaccactattctctagccggagccatagctgaaggtatttttaatgcctttcatgttagtgaaaatatctctgtagtagctatggacttgaactcagcagaccaagatatgagtctctattttctattaccagcaagcaagcactgacaagctgtttatcatctcctatcctttgtttcctcacttttaaaacaagcatagtcacactgcaggggcttttgaaaggaatatttgaaaagctcctgcacaagtcttagcaaagtaggctatcagaacacgaactttaatctgaatctcttctgttgtgtccaagactaaagaggagtctgacttgatctttggctcctttgacattgggagatcactgctacaaacaatcatactgtgagaagcccctgggattcctggagattcctgcatgtctgtctcccagactcttaagcatctggccttgactttctacaaaatgtaaaggaggcctccaaatgacagaccttagggggaacatctccaaatggttcttccaagcacaatgaatcaatcccctctccttgcatattctgagaattagcagaaagtacatacatatttcagagttacctcttaatacaattacagttcattcagccagcaattacagtaatagaaagattggcgactactgcaaatcaggtttaagagaactgatggcccaaggggctaacgcttcattctgtctggctctagtagcagacttggtgggcttgtgacccccatgtggtgtgtgtgtgtgggtgtgtgggtgtgtgggtgtgtgtgtgtagggagactgggcactcccagtggtgtaggttgactgattatggtgaccattttattatttttatttttatttcaacagtttgggggatacaggtggtttttggttacgcggatgagttcttcagcggtgaagtctgagattttagtgcacttgtcacctgagcagtatagtctttcatccctcaacctcctccaaacttctctgtacccccaaccccctcccgagtccccaaagttcattatattactctgtatgtctttgtgtcttcatagcttagcttccacttgtaagtgagaacacatgatgtttggttttccatttctgagttacttcccttagaataatggcctccagctccatccacattgttgcaaaagacattatttagttcccttttgtggctgaatagtattccatggtgtatatacaccacattttctttaccactcattggttaatgggcacttcggttggttccatatctttgcaattgtgaattgtgctgctagctataaacatgtgtgtgcatgtgtcttttccatataatgacctttttttttcttttgggtagacactgaaagccttcacctcctggtgaagacaggaggttattggccatgttagacactgaaagtcttcatctcctgtggctcctatctataccagcctcatagtctggattctgtggttttaagaaactactctgaagaaataaatgtggacagagcactacaggaaaatggtgactatagtaaaggcagggggcacgggtagtcctctagtgcttagctatgccccattccaatgttgatctccaaataacttctcactgaacttcatgtaagcctttgaagccaattacttccaactatgtctcattctctcaaattaaaatctacatctgattcattctctctgaaatacatatgcccagatatctaaattcaaatggcatctagctggaaggttggaatacccgtttacttcctacaaatatattcacaaagaagaaatgattttaaagaacagcaacaatgacttaaaaaacctaaagacaaaaaacaaaaacaaacaaacaagcaaaaaacgcccggcatggtagctcatacctgtaatcccagtgactagggaggctgaggcaggaagacaacttaaagcaaagagtttgagaccagtgtggcaatctactgagaatccctctcctaaaaagaagagaaaaaaataaaaataaattagttgggtacagtggcctgaacctatagtcccacctactcagaaggctgaggcgagaagatctcttgagcccaggaatgagtttgagtttgcagtgagttatgattgcaccactgcattccagtatgggtgacagagtgagcccttgtctcttaaaaagtaggaaataaataattttaaaagacaaaatagtgttagaaaaatggtagattgaacaatatttataaagtagaccagtctgggttagagcaaagacgaagaaaaagaaacatagaaggcagcttgacactgcgttcctgttctgttcactctccagaaatccagcaacctatcaaattaaaaagacctagcagcttatttctctgtaccatagactggtttttatctccactctgctttagactttatctctaccatagatttttaaatctgtattgagagaaagaaaatatcttaacgaatccttgtggaaatagaatttcaagcatacttgaaatgttctccaaaactgtggaagaaaaaaatacatgaaaatgataaaagataaactgatagacattgaataagaatacaggaattttacctatgaacaatttctccttttggaatatggtttgagacaaagaaagaatattacagcatatcagaagaagaaagaaaggtaaacagaaaggaaaggacagagaaagaatagaagcaagagaggaggggaggaggggaggaggggaggagggaaggggagaggaagagagaaagaaatggaagaacagagaaagggaggaagaaagggaaggaaggaaagaaggaaggaacaaaaagaggatggaaggaaggaagggaaggaagggagggagggaaggagggagaaaggaaggaaggaatgaaggggagaaggaaggaaggaagggaaggaggggagaaggaagaaagtcctttcatgcactaaagaaaagttagtacctacaggtggaaatagagttataactgataatttattgatacctaaacagaagaaaaaacatggtttttttccaatcatgagggcacaaaaaatttctatattggcatcatactttactgttgcaaaagtggtctttctgtaactctcttaaacatttatttcctcataatcacagagagcgttttccatgtgaattcgcacaaattccttgcttagaagccctcactggctctccctcatccacccagtaagtcccagattcttgaacaagacttggcctataactctctctcatgtctcctgcaactgccaatctgtcactctctcaagagccctgcaaaaaccatgctactcaataaaccacagacgtcctttctttctatgcccacttaacgttacttttcattcagatcttttatatcccatcttctccagaaagctttctctgtaccctcttctcaaacaagaataaatctttgtatcctgtgctaggatataatgaaaacagatcttctgtattaatttgtattaatagctttttatgttaagttgaatttttccatgtttgttccatcaagttcctcccctaagattgtgggtgttctcagaattgagtatgtgccccaacatctaacatggtatctagtccataatacgtgtgagattgtgcttgttgacctgaatcatggaaaatgcctgggccgtatatgaagtacagaagagctccaggtgtgaggtagtgcttggtaagataaagacttcaatgtagcacctggtattgtgagggtgacctgtctttcctgggtcttcagcaatgtaggaacttctttggcagtagttttaatttaatcctttaatctctaattttgcagcccatttagaaataaaaaaattacaagcaaagcttttggtttccatcttaattgtattactttatcaccaatatagaacagagagatccatagtggattacaataagtggagaggccctgtagctggagtgtgcctgcagaatttctaagaaggccagcatgcctgcagcatagaaagcaatggagaagggaaatggaggatgaagtcagaatggcgacgagggaccagatggtggaggctttcaggtcattaagggctttacttattttgaatgacgtttattttgacaacaattaatgggttttgagcagaggagcaagaagacacgacttacattttatcgggatcatttcagcattcttgaataagttgaaaagagaaatcatttagaaaacatctgcacctatccaggtaagacatgatggtggaccaaggtggtagcaatggaaaggaggggcataattggattagggatgtattttaaatgttgagccgacaggatttgctggtgggttgcatgcaagtcagtacttaaatgagattagccatggaatacaagcatcaaaagtaaagagcagagatgatgaaagtgatggtgaggtctgggccattctaagaattctaataaaaatcaaaggggtaagggttgatgtcagttcacaggctatggaactgtcaagaccaaagaccctgtgaggtagctgaagcaggaaacactttccttttatgtatcaaagtctccaatcctaatgctgtgctggagaacttggacctatggtgcaacctggcagtcaatgaatcaggaaataaggggtcagcctgatagaacatttaggagggagtgtgactcatagatgacaatgtcttaagaaggtctagtatgtttactcttaagcatcaagaaacaaatgacgattttcaatactcggagtatactggcagaggaatcctgaatcaactggcataggtctgccactgatgcaggaagttgaacctggcagctgcagccaatcagagctgaagaacagtcaagtcaaggtcaggacccctcttccagcctttgagcgttggcttctgcttccctccctcagtcctgatattccttactacttccactttcaaataactgaattacagccccagaccatcttgttctcccttgggccacagcaatgcaatccaccttcttcttaatcctcctgcagctccagcctgcagtttcaagacaggtgcacaaagttccttaacagtttcctctcattcagacacaacttcaatgaagtgaagttagggaacaaaatccactctatctactgcctcctatctttggtccactcatctcttattgtctcaagtagggattccctattctcattcttagctctgtagaactctgctgcctggaattcctggccctgtcagatgaaacgcgaggggaaaatttagacagatacaaacttagccatcatagttttgggtaaattttatattcacagttgtctgatttggtactgttcaaagctttttatgacaagatcataatgacaaaacttttaggtctcttggcagggaaatcaagaatgttcttggagcagctagttattttatatatagagagatatctatctatcgatataaataaaacatgtatacatatatatttatatataaaacacatatatacatatatacatgtaaaagtctatgtttacatatattgtttatctagttgtatgatcactctgcccttaaatgagataatttgattatatttgaaatcatgaaacgtgaaacaaatatgaaatccagattgttatagcatgatgtaactaaaagataattaatttccagatgtttttattcctttttatagtaatcttattttgctgcttatacttattgacatttactttatacaagctttgttctaatttcatctatctctctagaaaattatattctcacagcagccctgtgggcttaatgataatatgacatctattttacagatgtggacacttaagattgatcaaaatcaagtagataacaagtgttagggttggaatcaaatctagacctatttatggtcagattccgaactcttgaagagttcactgtatggtattaactgacagtaagcacatttaaagcgttctcttgggctggggcataaatgtagcccaactatgtttgcattcatttccaaactaaatgtagttaaattcaaaatttttcacaaaggagcagttaggagtttgtctaaatttctgataccctgtctctgaatgtggtcctaaaggaaaagaatctgaaaatccccttgtttctagagacaggaagtggttcttgcaggttcttcttttacaagaatattggtctcagtaaccagaactctgattgcaacatgtaataaattcaatatcactggcctttccaagacaagaaaatgaggaataggttattcattttgctgaagaagagaaaattttcaactaatgtttcttcagtaagaaacctactttgacaaagaagtaaaagatatgtcaataaggagccatattgctgctgtagaagattaacattttgcattgaagtgttggttctgataattttagtaaactttcctgttgacccatctctccaaagttgctgacactttggaattgtgtcccggtggcaaaacttgtctgaaagatgaatcatgttttcagagtttctgtcttccctgctgttgacagacagcagcccttgtcatgcattagcagggcaaggaattcttaaggccttctgttgagaccttactgagtgaaatgcttattattgaagtccctggcaagagagctcaatggctaagcaccaggccacagtctactgtactcccactctttgaatccatggtgaaaataatactctttgaaatgtgttaggaagagaaagaaaactgatgttggctaccatgctaattacagagcttaccagtaagatcttttagcttagtcatgcaagctgtgcctacactcatttattcacttagcaaacattatgaggtcaattttaccaattgttaatgtcttatgtatcctggatttattgtggactctttatagacaaacttcttgactaatagatctatgatcatttttctctgacatctaatccatttccaacccctactaatctggcttttgtcatcacaattaaaaacaagctttgtggtgtttcttttcttacctcaacatctcactgctctttggtaaatggaacactgattttgagctggaaacacgggcattttgaataaaaggactacattctccatccttcattgtggttaggtataaccgttttatatctaattgctggccgatgagagataattagtagaagcagtggctttgttttgtttattttttgttgttgttttttggtgggagcagctatataaagtcagaggatactgctggaagtgccactgtgcctttctacacttacctcttcttttggtttttagcaaacatgatcgctggagatgcagcaactatcttggacaacaaggtgacaagaagcttaatttgacaacaatacaaaaagatagtatcctgtgtccctgatgacaccaagagggtgcatgtaagtcttggaagcctacttctaaatatttgtatgtgagagagaaataaactcctatgctaaggctacttttttgtaaggttttctagcagtaagagattacaaccttactggtctgaggtatcaaagaatacagttcaaggcaggtaaagcaacctaatatttaggagagaattcctggaattaggagaattgaagaaaggctgagactacacttaagtataaacccttcctgaacaccttactgacaattaaactatacacgcctatgggagacaccagaggccaggcataagcacaggtaaaaacaaaagaagtttctattcttagaagctagaactacattgggtgagatttgttacatttttgactgagagcatgctgaagtggcagaatgctaaaatcttcctattctgaagttaaaaaaaaaaaaagagagagagagagagatcttggagctggcagagcaagctggaaatttacgtggaaaaccttaaaagcagggaatcacagagagggtgagtcccaaaatctatatgtaaactctgtccaaatccctggctgacagcaaaactacacaggtaaaggggagacccaaaggaaataaaggtaaaaatacaactgctggaaacacaaagaattgaggagaaataacagctgttgctcactgcaggggacagagtttgcagttcaagaacatgccaagtactatctgtgaggttttttttttaatcctcagaagaacataagagcatccaaatcactaagatatatagacttcaatatttatctttcaaccaaaaatgagtagtcatgcaaaaaaatttaaaaaaagatgagtatgaaccatatacagaagaaaggaagtcaatagaatttgactgagtgtgcctgatgtcagatttagtagaaaaagaattttaagaagctattattaaggtttcaacaattaataaaacctatatttaaataaataaggaaaatgtctcgatagttgaaaagttagagtatatcatgagtgaaaaaagaaaaaaacaacaaaatgaaaattattgaactaaaaattaatataactaagatgaaaaataaatcaccactacaaactaaagtgcttcttcacaggaaaataaacaattaaaaaaataaaaaggcagtctgttgtttagaagaaaatatttgcaagccatatatctgataaggggttaatatccaaaatatataagaaactcacataatttaatagcaaaaaaaaaaacctgattaaaaatgggcaaagaatgtgaatagacatctttccaaaaaaggcataaaaatggccaactgatatatgaaaatgtgttcaatattactagtaatcatcagggaaatgcaaatcaaaagcacaatagaacatcacctcagatatgttaggatggctattatcagatcgacaataaataacaagagttggtgagggtgtggagaaaagggaactcttgtatgctatatatgggaacgtaaattggtaaaactattatggaaaatggtatagcagttcctcagaaagctaataataggactaacccatgacccagcaatccatctgctgggtatatactcaaaggaaatgaaatccgaacttcatagagatatataaatctgtgttcccatgtttattgtaccattattcacaatagacaagatatgggattaacctaagtgtccatcaatgaatgaatggataaattgtgatatatctgtgggtgtgtatgtgtgtatgcatacgtacatatgtatctcaatgtatatataatgcatatgtgtgtagatcacaatttctttattcatctgtcaatgactacttaatatataatggcatattattcagccttaagaaaggagatactgctttttatgataacatggatgaacctagagaacattatgctaagtgaaataagccaagaacagaaaggcaaataccacattatcacacttacatgtggaatctaaaacaagtcaaatatatagaaacaggcagtggaacagtgattaccaagatcaaagacagggagaaatggagagaagtaagtcaaagagtacaaacttgaaattatatagaaagaataagtctacagatctaatgtactatagttaataatattggattgtatactgaaagtttgctaagagagtagattttaagtgttcttatcatatgcgcacacacacacaaaaataactatggaaggtgataggttaatttgcttcactgtggtaatgatttacctatgtatatgtatattaaaacatcatgttgtacaccatacataaagaaaaaaattaccaggtttgctgaacaacagattgaaaatgacagaagatagaattgttcgatttggagttagagtaattgaaattatacaaactgaagaacaaagagtataaaaccaaagaaaatgaataaggctccagagatctgtggaaaaatgacaaggagtccaacatacatgtgattggagaacacaatgtggagaaaagacagaagaaaatacatatttgagtaaatagcaactaaatttcccaaatttggtgaaaaccataagcttacagattcataaatctcaatgaccctcaaataacataaatgcaaataaaactacatttaaacacatgatggtcaaactggtaaaaagcaaacataatttaaaaatatgaaaagcagtgaaagaaacaatggaacaatcaatagtttagttctcattggaaatagcggaagtgaaataatattggaataaaatagtcaaaatgccagtttaaagaaaccctctcaggaatcctatatcctgtgaaaatatcattaacattatagacaaaatagagaaaatttcagaaaaaaggtttttctgcaattatttatcaccagaacaaggaacattttctaatttattttaagaggctagcattacactaataccataaacaagaattaatttattattacaagaaaactaaaaatcaatattacttatgaaaatataagcataaattcttttaaaaataatcaaattgaatttatcaatatatgagacaggtactatatcataagtaaatggacattatccaaacaatgtaaggttagtttgatattaaaattttaagctatataagtcacaatttgatcatcttagtaaatgcagaagaagcaaacagcaaaattaaactctcactcaggatttataaaaatctcagaaagctaagaaaacttttgggttgattaaaaacattctgtctcttaattgtggtagtagtttttggaatgtatccatttgctgaaacccattgagctgtacacttcaaatgggtgcattttatattatgtcagttatattccaatatagcttgctaaagaggaacctcacagggaatattgtacttaattttgcaatgttagaactcttcctcttaaatttggtcaaatgaaaaataaccagcaccatcactacttgctgtaatactggagaaactttcaatggtggctaagaaaaaacaagtgaaatttagggctccaaaagagaaaacaaaataacattatttcacaggcttgacaatttacttagaagagcgtaaaataatctacaaactgttgcaatgcataaaagaatttagcaccattacagcctcaagatcaaaagtcaaaggtcaatagcattcctatgtcaaaataaaaaaaaactaattaatacatagtcatagtctataataaagccatatgtttgaactattaacaaaattattatcaatttcctgaaaataactcttaaaatgatatggacttttatgtacaaaacaaagaaactttatcaaagtacttagctggggcctggttttaaggcaaaagtggcttttgcaaatcagtaagaaaatgtgattttaagaagtaattttatattcctatgtcataccaccaaagaaaaataagcttcaattttatttaagattcaaatgttaaaatgcaaaactttaaaactacaataaaaaaatcctgggagaaaaatatcactgctctttgaactttccaaggacactcataccacaggaccttcacacgtgctgctccttttgtctgaaatgctttttcaagatgcccccgtgccttgttccctttcctctgtcaggtctctgctcatttgtcatttctcagtgggactttcctgaatcagtccatgtgaaataataccccccagctccagcactttttctgcccctatgtatctctctgtttatcatcacctgaaatatttacattttttttaaggaaggagctttgttttgttcactgttgcatcctgagaatctgaaatgaatgtattttgaaaatataaagggaaaaatagcaaatgccaatacttgttatattcaagttatgaattttagtagttcccaactagtttcatagcatatatgctgtttcttgttttctgttttcaatatgtttatgattgtaattaaaatgaagaataatataaaagattgcaaggatgttacatgccagaaaataggttaatattattcagtgcattaagagatgatagctaagaaatcatttggatgttttgatgtctggcaaaaaagtcacttgataaaatatagcacctacttctgaaaaattaaaagcaaaaataaattccttaaaatataaatatgtaaagatttgaaacttgataaaacagaaagtcaatgacactcatcatataattttaaatttgtcatccattgctattaaagtaagcaaattgctatgcaaacgaattttgaaattctaaacaatgcaataaaatatgaaaaacaaataaaagtctaaatatttgtagtgaagccatgactctaattttttggagaaataagtaaattttttcagataaatccatggaaatcaactttagagcttttaaaactaaaatgttaggaagccatttcactggtgactgcattgaaatcaatgattttctgatgtccaagcagtaacgaatgagaagttccagatagaaacaaaccatctacaaggagccaacaaaacaaaggtatgcacacacacagagcaaataagctacaaaacatttgaagataatagtaagcacaaatgctcaagattgaagaagagcattcaagtttagttattcatgattatattccccaggtctgccatatattaggtgcttaatgaatatttaaggaatgaatacatgtagaagaaacacctaaatatgtgtagagatttaatcagttcttcactggaagacccaacgttaaatgaagtatattatttccaaaattatgtacaaattcaatgcaatgacgtttcatttgaagttgtgagccacatataaattaatacatggcaaagggatatttaaaacttgttgaaaatgtatttataatttggctgaccatttgtaaaaataagtcttttagttagatagcattaaataaaaataatgctatctagggtctctgctttatgcattcataattattagtcatttttatgaattggatagacttttatataaaaataaatgctaataattggaaaatatttagatttctggtgtcattttcattttattattttaatagaaaagcctatagtgattcagccttaagtatgacattggccattggtataagaaaaactatactttagattgcttattatctatttcaattttacttataatacattttgtcattgtttattcctaaagaattttctgttttcatcatatctcttttgaaatactctaataggatattttttcttctattttcagaaaccaaagtatcactgttttctgtttactgtcagcatttataataaatcagaattttatcaatccagtaaattaatgaggaagccagtcttgtattgtttaaataacttatatagtttagaaattatctataccttccaagatcaacgttctatataaaaataaaaaaccaccagtgattattcctaaatcaagtacaattgaattaaaggcaataaaaaacattaaagagagaaaatcctgtccattttgtacaaataacaaatacaatgcatagtgctgatataatcattatgaaattttatgtgccaaataagtaatattaaactatataaagcaaaacgtgtaagcaataatatgagatgctgggaaataaagttatactaacaaccttaaccacgatattctttacttaagaaatatcaagtagataaaaataactttcacatctaagaatatgctaacaacacaacttatagcaaggagaaatttaaaagccataataataggagaatcattaagtcattatgattggtcaataatacagaatgctatgcagtctttaaaacgcacattccaagtgatgtttagagatatggaaatatcactggaatgtcatttttaattatagtctctgggaaattttaaagggacaggaaactatgaacaaagtgaacagtataatgataaatataactatttctcacttttatctcattttacatgtagtctgtctctctctctcacacacaaacacacacacacacaaatacacttcctatactagttccattttcttctccttcttccattctgacaagtaatcattatcaaaaatttagtgtgtatttttttaatccattttatatattcacttaatgtaactataaataatatgtagtgtttctttggtttctatttacatcaatggtaatgtattatagtaatatcagctattaattttcaattttataagatcacatttctgagatccattcacattggaatgtagtagctatagatttaaatatagatgatatagtatttaatattttgtgcttttgccttacactgcactttcatttcctgttttccacctcaagctaaaattttagcattttacttttattctttctattaaagtcttctttgcacataccaacttgtgcacatgttctagaattttctagaatatagacttggaaaaaaactactaggctttaaaggattttattttattttattttttatttttttgagatagagtttcactcttgtcacccaggctggagtatggtggtgtgatcacagttcaggacaacctctgcctcctgggttcaagcaattctcctgcttcagcctcctgagtaggtgggatgccgagtacctgagattacaggcacgcaccaccacacctggctaagttttgtatttttagtagagacagagttttaccatgttggccaggctggtctcaaactcctgacctcaagtgatctgcctgccttgtcctcccaaagtgctgggattacaggcatgagccactgcgtgcctggtctctaaaggatatctattttcagttttatatatactgccaaactgttgttttttttttaatgattgtaccaactcacacagcacagcctgagaggtccctttcctcacttctaagtctagatgtgttactctccaatttttttttttttgcatttggatggcagtaaaatgtatctcaatgttgtgctaattttcattttgctcatttctagtaaatttgtacattttcttatataattttggcctcaatgctctcaagtctacaccccaccccccatgaatcacagggtaatcaactctttccattttcttatgcatttgaccatttttgtacagttcttggcataacctggataataatttgtcttttatgtactatgcaaatattttctcccacacaaaatgggacttttaaaaactttgtctaaggtttcattttttagtgtgaaaatttttcattttgatgtcatcaaatatttcagtcttttcctttgaagcttattctttctcttgtgtgtttgagttatttccctatcttgatatcataaaagcctttccatctgatagatttgattttttaatattaatatttaattgtgaaaataggaaataatgtatttctgagtgactataggagttattttagatatatggagaacaattaagacaatctaatatactaaatatttcaatatctcctcacttttataatgctaccttatttatataaaatgttggatatgatcattttattcactataattttataatgtcttcacagctgttcaagtcagttttccctcaattatcttcttctactatcttataaaattcaaaattgtcttgactttttgaatattattccacatgcattttagaattaacacgtcaagttttataaacaaacttttactttttggcattgcattgaactcactgataatttaggagacagtttgtatttgctatggctccttttctaaatcactccacagtaatcttacaaagagcattttcaaagatgtgtttcttcccacatgtttaattaatttactgtgattaagaatgagactttcggccgggcgcggtggctcacgcctgtaatcccagcactttgggaggccgaggcgggcggatcacgaggtcaggagatcgagaccatcctggctaacaaggtgaaaccccgtctctactaaaaaataaaataaaaaaaaaaattagctgggcgtggtggcgggcgcctgtagtcccagctacttgggaggctgaggcaggagaatggcatggacccaggaggtggagcttgcagtgagccgagattgtgccactgcactccagcctgggtgacagagcgagactccgtctcaaaaaaaaaaaaaaaaaaaaaagaatgagactttcaaaatgcattttctcattggttattgttgatattaatatgtatgaattctcttaatttttgagttatacataatatcttaaattcagacacttttctggactatcacaatagtagttttaagaataatacttttaagaaatgtatatagttgtcttaatagatttaagaaatgtatatagttgtcccttcatgtccatgggggattggttccaggacccacagtggataccataatccgcaggtgccaagtcccttaaataaaatggtggagtattggcatataacctacacatggctgctcatagactttaagtaatctctagatgatgtatatacctattaaactgtaaatgctatgtaaacagttcttattctgtattgttcttatttgtatttttattgttgtttttattttttcagaatattttcctgcagatgtggaacttacatatatggagacccaatggaaacctcctgggttttctatgcagacaattatgtctgcaaataatgagttttctaaacaaattcctttctgattttttttttgcttgtcttattacattgcctaggaataacattattataatgagtagaactagtgataacagtcttttgtcttttttgtgcatttaatgcaaatgctcatctttactattaagtgtgctaacagctgaagttatcaggttaatatacttcaccaggttaagaaggtttgtttctatttctgttttgttaaactacaaaaaaaatcataaatgaaaattaacttttcctcttgatttatcacatttatttaaataaacacagttatgatttctcttttaatctactaaaatgttggagtcttctctaatgttgacccatcattacatatctaagatgtctgagaaatacacatttgaggtaaattctacttgtttatggttttgtaaccataccagacaaacctgtttcaacttttatgtaagaaagttgtgagtttttcagttgctatggacccccacacattgacagtcacataacctgagcatgcccagttgaaccaactatgcaaccacagttggaacttaagtgctcagaccaagaaacagggacttaattaagacatggataccacatggaacaatccaggatccaatcagatcaagacttggtgtcaccttatagcaggatcctgtcagatcaagagatccatgcctagtggaatcatctgatttaaaaatccaatcaaatcacacctcattactctatagctataagacctgccccagctctccagctcaaggaaatggatttgagcctttcctcctatcttcttgccagtcagcttgcagagaaccttttcttttctccaaagccagtgccatgacattggcttgtatgggtatcaggcagtgagcccactgattgtttggtaaaaaattttaagtgacatttaaaattttaaataaaatgtgaattttgacttgctgacacttatcttgggagttctccatgaacgttcataattctgattgacctataattttgtcttattgaactgcccttgccttagtctggtattgatattttaatattctctcaaagacctgagaagcttttcctatttctttactttctgaagcagtttataaaataagtggattatatttttcatcacgtgtagaaaataaaaaattcttggccctagtatcttaacatttttctaataaaaattaatttttattataaaaattaaaatttgttattaaaaatttaattttttaattgtaaaaattttttattataaaatttaaaaaattattacaaaaattaacaattttttattatactttaagttctggggtacatgtgcagaacgtgcaggttttttacatagatatacacatgccatggtagtctgctgcacccatcaacctgtgatctgtatacattaggtatttctcctaatgctatccctcccctagcccaccaccccctgacaggcctggtgaatgatgttcccctccctgtgtcaatgtgttctctttgttcagctcccacttatgagtaagaacatgcggtgtttgattttttgttcttgtgttagtttgctgagaatgatggaaaaattatgataaaaaatttaaaattttcattataaaatttaaaaattttataataaaaatttaaaatatttattattaatttaatgtttatctttttataatgacctttttcttgttgattctattttggaatttttttcttacatttcccattttgtctaactcttctcatttactgccatgaagctattctgatatctgaaacctctcttgacctattattatttattcctctccatttcttttcataattaatttataatttcctccagttttttttcttgatctgtttggtttatttgtattagtcttttctgcagactgtttatggtttcactgaccatgtctaatactatgtatattttaaaaatttatttatgcttttctattatttccctccttcagctttatttacttttaaaatgttttcctagtatttcttaactgaatgcttatctcattaattttgaatttttttgtttctaaaagaattacattaaagagctgcaattctctttaaatgttagtttagctgtatccctcaattatatatataataacttcactttcattaaattctaaatattttctttattatatcatttccttttcttttcttgtaatttatgatgtttgtcaggccctgcaaagttaatgatgttttaacctttcaattctttcatggctcttcatcaattgattcatgtctgctcccttagcctatgtgttccccaatggcaggaattatcttcatttaatcccctgcctaaggccctggtatagtactgggcataccacataggcatagataaatagttgtcaatttcttacacccattcatacattgattcattcataaatgcagtcattcatttaatagatatttcttgagtttctgagaaggttataaaggtaaatgttctaggcacttagattggttatactctgaatattgctggcatctagtaatctgcgacatgatctcatttgtttaaaggtgtaattcaaatatcagccactatacagataacattattttcccataattatttcccccagatctttcattttgttattttggcttttcgtggtagaatcagagtccatcttataaattaataatgcagcatgccatgttgaggtgattaaagaagaaactgtagacccttttaacttttccttttgcttggatagacatttaagtctgtttgattttagttggggtttattttttgctctgctgccattggaatcatttaggatgctttttaaatcactattatttgaacacgagcccagatttaaaaaggcaaaaatacaagataagtcagatgtgggcctgggcaatgatattttgtcaaaggctctcaaatgattctacagtgtacttacggctgtagcaattgaaaggtatttattgtttaagctatagcttacagcctccttatacttacgacatttcatttactatttctcttatggtttctggggaattcaaacatggttgagattgcaagttttatacacaggatgtgcaggcattggtaaaaagattttcatgttgctttaaagtaagcatgccttttataaaaatgtactgtctattcatacctgagatgaagtaccggccaatctgaggctctccctgtatctgagaataaagaaacagtgtattagaaccctgcaggttccattccagatagacaggtgaggtcatcatggtggatgtctcatgaaggcttccagaaacctcagaaacctaaattagttcttcaagcatttggaatgctgctgctctcgtaagcatttggaatcctgctgctgtggtcaagtagtgaggctgactccaagaagagtactttttcatattttcattattttcaccactggagtgaacaccaaacttctgagtcttgggtaattatgaatatactaacttgggaccaaagggtgaggccatactgtccttgccatttggccattagaacttaataaatgagcccctattattaaataaataaaatacaatgggcttgtacctccttgccatactagttcaattttaactactttattaattgaaatatcagcagcagtagggtgctaactgcccagattttaccaaagagtcactaaccattgtggaagtaacttgtgcagtctgcaagtcaggcccatcttataagtcactgcatggatagttttcctgcagtcaccagcaaacctgtgatattaagggtcctcttccctcagtagtcattttctgttggatatccattccaatcaactgctgtatccttaggtaaccttaatttttcttgacaataggcatttctaaaatcctaactaactgtcacaaagaaggtacatgttatggagctaacacatttttgaagaatcaaatgagtgctaaggaaggcagggctaccattgtttggaggaatcatctgataagtatttgatttcttccaaatgataagtcctgtctcctttctgattcacttttttttgaaaaacgtataaaatgatatattttgggctcaaataaggtcagttagaaatagctggactcatacccaaatagtttgttctagttgtgactaaaaccctcagttgaacttttctccttaagagaaaaataacaactctctatatagacatggtgatttgaggaaattctctgatgtagctaatgtaaacaattatgtatcattgagtctaggaaactggattctccaaattatttctcttgtaaaaatgtatttgttaagtaaactgtagtccacaccacttcctcagccttctccaaagaaacacactgcttgaacaatcaaaggattacaaatttgaaagagaaattaaagttcatctcactgaactcactaccaacagaagtcaccatttattctgaaaaaatcaagattatttcccagggactgttttgcaactagcattgtatttagggagcttgaagaaatatatgcatttattcacattttaactatatttcttggcattctttctgcatccagaatttttattttcttctttttttccaaatagcaaacaagctttgatcttatatcagtaaatttattcccaaggtgtcttagtcgattttgtgctgctataacagaataccacagactgattaattgatagtgaacagaaatgtattggctcacagttctggaaactgagaactccaatattgaggtgctgacatctggcaagggcctttttgttgcgtcattacgttgcagggggatcacgtggtggaaaggcaaatagagggttagagagagacagaaaagggaaccaaacccacccttttgtaaagaacccactgctttgataacagccttaattcatttgtgaaggttgagtcctcatggcctgatcacctgttaaaggtcccgcctcttaacactgttacaatggcaattaaatttcaacatgagttttggaaggcacaaacactcaaaccatagcacaagagtaagcagaaaatatgccagaaagcatgggaaaatattactaaagactcatgtcattagtatacaaatgaaaagttttcacttctgtagttattgtaatccaagattctcaaacttcgtagattgggaggatttgattttatacattgtcagttcaatgttgatttggctagaaagatttgatgttacttgtttaactatttgaaactgagtgctatctgtggtccttgggtgcagtggagggggaaacgatctgatgaactcatggaggaacataggttctgagaatgagatgcctgattgatacctggctgaggacttgcatgcttgttctaaaatgtctgttcagttgacctcttcaagcttaattcacactacattgaagacaaatcagctcttcctcgtgtgaggtagacatccatagaaaatacctgagttatcttatcccagggataagataatctatctgcatgcccaattcaagtttgaaaactcctatcttagattattttgagagcttacatcttaaactttagattttaacaagagagaacacattaaatttgacaaaaaatattcattcccagaagatattgcaaaagatttctgatccttatattcactagttattgaaattcatatttggtttgtcctttgggcatagagttgtttgaactaagaataatttattaatttagaagacaccaattattagtttttagaacagacctactctacaattttctaactttgatgattgatacatctccccagaacctgccttaataatgactactcaaaccaaagatctggcattgttaaaggaagaagtaaaccattttttaaaataatcagaatgtgtttaaagaaactatactcttaaaaatattcatttttaatgagggccatggaagttcatcagcttcagagtcacatgcaatccgaccctgggtggttacacttgtcccaaaatctgaacctcctctgtgaagcattcgagacagaaccttgttatttctcagactttggaaaatgcattgtattgatgttatgtaaaaagccaaacctctgttcagtgtaaatagttactccagggccaacaatcctagtgctttccttttttaaaaatgcaaatcctatgtgattttaactctgtcttcacctgattcaactaaaaaaaagtattattttccaaaagtggcctctttgtctaaaacaataaatttttttcatgttttaagaataaaatatttatttttgaatgtggtagatgaaaaactacatgcaagatatttatctcaaaattatcaaaagtcattgagtatttgtgtgcatgtggtaagtgtatatatgtgtacatgctcagtaactatggaaacaaacaaaataagtcctaaaattggggaaatctttgtttacccagtggagaaagaggaggaactgaccctaaataaggaagtcaaaaatgtaacaatacagatattttgaagggcaccaaaaattgagccagaaatctaagtaactgagatgattgtaaataatacacaataataaatataaagcatataattataaaaccatatacaactatgttcctaattttgtcggcttttaagaaagcttgttttctttagtgttttcttctctaggaagcttaggaataactacatttacagctcacctattgcaattgccaatactttatgatatatagttctgagtaggactcagattctatccttcaaattgctaaccaatggcttccattgacttaattattgttttttattgcatctttaaaaataactgacacacattcattaagaaaaaataatgattatatgtaaataaataatacattatctgcctttgtatacatctatctaaatataatatctaggacctttaattgctaataaataagcatgttgccttctttgcacacataatatgtatgctgataatcttacaatagtacgatatttctattctgaagaaggctttaccatattcaactatttaatctcaggaaggtagtttacctctaatatatcaatagcctctaactgctctttgatgcccacaacaagttgagacaggcagagcctcaaggtggtttccctagaataaacattgagtgaaggatgtgaaggtgagtagcttatttgggagatgatctcagaaagcacagcaaggaaatgagaaaagaaaggaaataagacagtacgggatgcacaattgagtccattactgctcattatcctagttgagtaactagggctcaacctcatgagggatatctgttgatggttacagtacagagatgttatcaaaagggtgaggtagctgagctatttttctaccaacttcaatctgtcattgattgaagactgttacaagggtcattgattccttgacacttgcagcctgtcttatatggggggttaagcccactcccaagctctctaaaacatctgttgcaggtgttttcaggaagaagcctttagtagaaaaagcaaatacctaggagatatgaggaaggcaccagcaatgactgttatagagaacaagagagagaactggtgacaaaggcatcttcaaccttcctgaattcatcctttgcatagtttgataacatattattcagtttgctttgtagaacagacaggaggtgaatagtggttcaaatagttaggacaatggtatccttttttggctcttttaattataaattatattcttaggctatctgacatattcagacatcagtgcaagaaaatatttcaaagtcaaatgtaaacacctcttagatctgccactggggtatattcctgctccctctttttcatagcgtggtttctggagagccagatattatcaagtcgtgacagctatgagggcaaaggagaaatcaggaatgagttttttacacactctttctgcagttatttctttccgtactttctataaggcaccgtgaaccaaattccatctggttcccatgcattgtaacactttagatatctgcctcagacttctctggagataaacttctggctaacttgttttaaggccttctgtcctgatccttttatatctccaacagtcagcttctgtcaaacttgtgggaaataaaggattttacagatgctgataaaagatcagaggcacaaacctagtttaaaattccaaaatcgatatttaaaaaagggatgaaaacccccaggaaacccctaggttgtctaagaagtcctcagttcaaagatggtaattcagggatgaatctaaggatctgagtgtcaataggatctaggtttgataggaaaagaacgatctttttcaggatgccatggggactgtttgactttatgaccactgtacaaggtgaaactataagcgaggcagtggggccaatgggaaattgtgcagaggaaaatcatccattctacttttctctaatgctcagttcttaatttttctggaggaaaaaacaaacagagattagagatctcatcggtttatccaaagattccattttaacacacagccaaattaataaggtttaaaatgaccaactgaataaggagacagctgtatatcttcaagatattgtatatgatcttcaaggttaagagtaagggttgaggtgccatttttgtggaatcttctagaacctagattgcaagggttacttttctaagcaaatgtcttcacctgtagatttggcctgattttgtcttaagccaggtgagacagtctgactgttacaggatactggtgtcagacacacgttttccttaaatctgttaaggccacttgaatctgagacttcgttttccaaccaaattatcctgttcctctgtggatctgaaatcctggtctgaacagtagctcttctgcctttaccttgcagacagtttctccaacatttaggttctccccacgcccctaacttcctcatgaataagcaacttacctagatgtcagtgctggtatctggagtctttctgatgtctgcatgttcctggaatatattctcagtacaccagcgtcttcatactcatagtctttcccagcttttgaaacctctacaagccaggttttcagtctctaatctgtctgtatgggactagccagctgcccatgatgggataattcctgcagaccaatggctcagaactcttgactgcctttgttgttcaggtttcaacacacctggagtctcagtccgacatgtttatgctagagctccctatgacagggtgatagagtcatttgatggtcccaggataaggatgttaaatccctggcacttatgacactactccttgtttctaaacagggattgacaaagactttttaatcaattagtgtgcacttccacacccaggccagacatggtcacatggttttcctcactttattattttacacagctaattcccagagatatcagttaaacaaaacccacattctatccctagtggaaagcttgctgctaaggccagtgcttaggagagagggcaccacaagttgactccgaatatgagtttctggggagggacaacatcgctggaagcatgagacagggagctgactggggagagatagaaattgaatcacattgaaggataactaggagcagaatctctaaatggcccaatgacactcaaattcttggttttggccacactcaattcttcagcaatcctggctcagcagttcagggtcagagaagcagagagcagattgatccaaatatgggaagtcccagtagagcaatataaagagccacaaatgaatatattgggaggtatctcaacacttcctattgagtacggaacacacagcatggcactaatcttagtcatggtggtgagcacagcttatcaaagagctatagtacctcttaaagaagcattttgccaagcttaagatgtggctcccctttatcatggagaagagaaactgagattcaaacaggattgctttaatgccacattaataatggccaagtggatctaattgtaaacttgcaatgtttgtttatgtgagtcctacctaatttccccaggatcttctgctcccaaatttttagagctggagtcactactgctccaaccagtagacactcatgagatcctgagccaacattgatcaggcagggcatagaccagccatcatgcccccaacatttgtcagggcttggaataagtcattgtcttttttggagaagagggacaattatactcttttcttcataattacaactctatccttgagattaggcacactcacattaattctgtccctctttcttattttttattaactcctctctatctccagaagaagaaaatcctttaaactgggtattcagagcccaggatattcttgggccttcatcttccagtagatgcttatcctgtgcctgatagatccaaaggcaagggaaagcttcatctttgtgtctttttatgtagtaaataggcctgacaggccctacctgcatgtccagctctctgctttccctatgattgggcaggattggtactgacatgtatgcttgccatttagcatttcacagagggaagtaagaggccctagttctgccacatggcctaaagaaagctcctaattttttaaacaaagaagctgcattttaagaggggatgttttcgagcatttgtcaaattttgataaactttaatttggtcactgttttgcttttgatccttgtctaagtatagccctcatggaagggaaccaaagaagagaggaggtgcaattggaaccattctgttgggttggtgcaaaagtaattgcggtttttgccattgcttttaatggcaaaaaccgcaattacttttgcaccaacctaatagtcccctaaacttactctggcctactcaagggtattctcaaacccataatctagtataggccaaactactgggctgctttctgtagcccttctcattgacttacttggtcgttgtctagtaagttaccataatgataacttatagctgatgttattgaatcactgcaaacattctctggaccaccaagctctaactagcaaagaaagaggttttgttaatctctacatttgccccttccccaaaaataaaaataaataaaaagtagccatgtaatgtcatagcgaattcatttgagcacagaagtaataagttcaattttataaaggttggtgcaaaaataattgtggttgaaagtaatggcaaaaccaattacttttgcaccagcctaatatgagtcaagcttcataagagttattggccatctgaagagctgtgttgagaaggaatctgataccataccaaagatcaatgtgaaatcatgatttgattaattaaatatgctatgaatatgagagaggggaaacgttatcatgagtgccaaatatttgttatttcatgcctagaatacaagcttccatggatgcatcagaaatgtggccaacacctacacatgttcagaaataaagtgtattttctttattacttaaaatatagcatgatcatatgtcacttttccccatggtggatggatttacacttgtagatattggttgacagcacctcatttcactctcaaatttgtcccagtttggacagtatgtatgatggtcagcctatgagattagttctactacatcctaagtccgagacttaaaattatagagtggaaggtaagagcctttctaaattatagtaaccctcctagggctcaaataaaattgcctggccttgtcaaaagttgacaaaaaatcacattcattgatgttaaacgtagtatatacatatagagaataatacttctaaatttttcaccatatggctcaaaattctattacactgtatgtttctagaatgcagggtattatgattttggcatacaatctagcattagaacacaaatatctgcttctacagtcactatgtgtctgagaacacagcactaaatccctagcttgcacgtggaagtgttaaaatatctccagaaacttaggtaaacaacacgaaactcaaagtgtacacatgcacacatgcaaatgcatattctttaagtggaacatattaggtttagcatttatacatgaagcaatataactgatgcatatagtacctatttctgaaacaagttcagcaatgtctcctccaaccctccaactccatttttaagtcccagaataaatgcccttttatgtctcagcagaaggcccagccaattctgcaaatggtcttggaaaattgccttcagaatggagtctctccagggaaggtttactgtagaaaaagcagagatacatggggattttcaagatccagaaaaaggcaaaggaggaggtagaaggtaacttgaagcagatggcatccatttctctttacccagtagttctattcattattaacagcaacagtttccacttgtgtggagaacaattttgtattgatccaatttaacttgctaaatccacaagcccagggtctatattccaggcagtccactgtggggaaattattcctgttgggaacaatgattttctattttggaaactgaattcaattgaatctgacccgacaaatatctgagggcttattatgtaacacctctctctctttatattttattgtgccctgaagaaatactaaaattaaccaagtggaaaactataaaataagacatggtaagtgccatgatcagagtaaataattaacaaattgctcagatgttaggaagactttattcaactgaagtaaccagcaaagaattcaagaaggaaataccattttaaattttcccaaatagatgggtagatttttaatgggaaacaagagggactaccattcttggaggaattcacccagcatatgaaaaggcacacagggagagacttcaagaggcttgtgtttggagagcaagattattttactagattaagattacataaagtaccaaaaaactatggcatgtttgataaatttcagttcaatctatttgtgaaataatttatccaaagctcatagaagatattattttatcaccctataatctaaatgcacaccaatgagaatttgaacaagttgacactaaaatattccaaataactctttgaagaaagagaaagcaaaaactggaaaataatgagagtgaggatgctaccaatctaaggttattatctgtaggtaaagctttcttatcaggcaacgtcacatcaatgtatggttttactgaacaagaaagaataaaaaatacctaagtatttatatcaagaagttagtattaagcacaacaaattaagcataaagaaaaaaggatgaagcatataaaagtagaaactaatgaattaaaataaaagcaaagcaaacataaatggtgggaagagaacaacataaatataaagacaaatagaactgatcagttatataacatcagatattagagtaaataaatgataagaatctgatgcatccattgaggcaaacaaatgttagtgtcaaagacaagaatatttttaataaaaaaaattaccaaaacatactcaagaaaaaatatagtctaaataaaccaataacctgagaaaatggcagagagctgggtgagagaatttagcaagggccattgtgttttccaatgagttattagaaattttagaaaaatacactttccatgagaaaataatagttacatgccatgaaatattatgcaatgcatcccagttaaattgagtcatctggaagaatccaaataaaattgaatccaacaaaaccaggtaagctttaacccagcaatacaatttactagaatataaaaaccaagctctctccagcatgcaaagatacagccagaaagtagctgtctacaagccaggaagagggtcctcaccagaacctgaccatgtcaacctccagaactatgagaaataaaagtctgttgtttaagaaaaaaaaaaaaaaacagacaacaaaaacaaaaaacaccagcaccaatagcaacaatcctatagctttagtatgatatatcagtaggccaaaagagaaaatattatatttattttagtggcagaaatgacactttatataattcaattaaaagttaatattactactataaccagaatttttttatgataaaagataacttttttaagcagcacaatctagcataaaagtagaaccattctttcaaagtcaggaacaaggtgagaaatgttgctttattattttttaagcttgtttgtaaagttctagcaagggcaataagataagaaacaaaataattaataataattaagaagacagttctatcactattcactgaggatatgattcagaaaatacagaatcttaaaaaatgtttaaatttatgaaaaatataaattacctaaatatactaagaaagcctaaatatgaaaaagaaatataaataacccaatataaaatcaaatactttatttagtcaaaaacaagaaataatacaatgaaaatattaattataagggcaattatctgtatgttcatgaaattacacactaacttcataaataaaacctattaagtccaaactaataatacaatataattaaagtcctgattaacaaggctaaggtggggtttgagatcactgagattttaaagtaaacaactttttcctattcaagagaaagatcatttgtttattaacgtcagattctataaaattaaaatgtatgctatgatacttaatataaagaataaaagaatagaataggaaatatagcttctaaactagagcaatgtacattttacttctagtaaagtcttgataacacctatcagaccaatcctcccacagattacgactataattcctggtgtgttaatcggttttcacactgctataaagcagtgtgaaacactacctagactgtgtaatttataaacgaaagaggtttaattgactcacagttctgcatggctgaggaggtctcaggaaacttataattatggcagaaggcaaaggggaagcaaggtacatcttacatggcagcaggagagggagagaaagcaaagggggatctcccaaaaacttttaaagccattagttcttatgagaactctctcactatcacaggaacagcatggggtaaagcgcccccatgatccaatcacctaccaccaggtccctccctcgatacctcaacacgtgaggattacaatttgagatgagatttgggtggggacacagagccaaaccatataatctggacaaaaattaagccagccagtcagtaagcaaataaataagcaaaaaaactatctgaaagcattgaagaggactaaaagcaagcagatactgaagcttagctgacattttaaagaatcaaagagcatgggtgagttttcccttttaagagcttttctttgttggcagaattcaatctgaattgtgctatagggctacagctctttatggaaaacctaaagtcctactttcttgacaaaccagagaacaggtcactgggtgatatggtttggctctgtgtccccactcaaatctcatcttgaattgtaatccccacatgtcagaggagagacctggtgggaggtgattggatcatgggggtgggtttttctgatgctgtcctggtgctagtgagtgagttcccatgagatctgctggtttaaaagtgtggcactttcccctttctctctctcttgctgctgtgtaagacttgacttgctttcccttctgccatgattgtaagtttcctgaggtctccctagccatgtggaactgtgagtcaattaaacctcttctgtttataaattacccagtctcaggtagttctttatagcagtataaaaatggactaatacagaaaaatggtagtgggagtttggggcactgctataaatttacctgaaaatgtgaaaatgattttggaactgggtaatgagcagaggctggagcagtttggagggatcaggagaagataagaatatatgggaaagtttggaattttctagaggcttgttgaatggttttgaccaaaatgctaatagtgatatggacaataaagtccaggctgagattgtctcacatgtagatgaggaacttattgagaactggagtaaagttactcttgctatgctttaggaaagagactggtggcaatttgtccctgccctagagatctgtggaactttgaacttgagagagattatttaggctctctgggagaggaaatttctaagcagcaaagcattcaagaagtgacatgggctggatgcagtggctcaggtctgtaatcccagcacttcaggaggctgagtcaggtggatcacctgaggtcaggaattagagaccagcctggccaacatgatgaaacctcatctctactaaaaacacaaaaattagctgggcatggtggtgggcacctgtttcagctactcgggaggctgaggcaggagaatggcttgaacccaggaggcggagattgcactgagccaagatcatgccattgcactccagcctgggcaacaaaagcaaaactccatctttaaaaaagaaaaaaaacaaagaagaagaagtgacctggctttttgtgaaagcatacattcatgtgttcacaaagagatggtctgaaattggaacttatgtttaaaagggaaggagaaagcagagcataaaaatttggaaagtttgcagcctgaccatatggtatgatatggtttggctttgtccccacccaaatctaatcttgaattcccacatgtcgtgggaggtacctggtgggagataattgaatcatgagagtgtgtctttcccatgctgttctcatgatagtgaatgggtcttatgcgatctgatggtattataacggggagttccctggcacaagctctttttctttgcctactgccatccatgtaagacatgacttgcttctctttgccttctaccaggattgtgaggcctccccagccacatggaactgtaagtccaataaacctcttccttttgtaaattactcagactaaggtgtgtttttatcagcagtgtgaaaacagactaatacaggtagaaaacaaaaactcattttccagggaagaattcaagcccaagcaggctgcagaaatttgcataagtaacaaggacaagaagccaaatgttaatagccaagacaatggggaaaatgtctccatggcattccagaaatctttatggcagccccttcatatcacagacccagaggtctaggagggaaaaatagtttcatgggcttagcccagggcccagatgctctgctcagtctcaggatacagtttgctgtgccccagccacttcagctccagccatggccagagggaataaggtacaacttgggccgtggcttcagagggtgcaagacccatgccttggtgacttccataagcaattgggcctgcaggtgtgcagaagacaagagttgagctttgggagcctccatctagatttcagaggatgtattgaaacaccaggatgtctaggcagaagtctgttgcaggtggggagccctaatggagaacctataataggggagtgcagaggggaaatgtggaattggagctcccacaaagagtccccactggggcactgcctagtggaactatgagaagagggtcaccatcttccagaccccagaatggtagatacactgacagcttgcatcagacacctagaaaagccacaggcactcaatgacagcctgtgaaagcagcccagagggggctatactctgcagaggcacaggaacagagcttcccaaggccttgagagcccacctcttgcaccagcatgtcctggatgtgagacatgaagtgaaaggagattattttggagctttaagatttaatcactgccctgatgggtttcatatttgtatggggcctgtagcccctttgttttggtcaatttctcccatttggaacaggagcatttacccaatgcctgtgcccccactgtatcttggaagtaccaagtgcttttaattttataggcacataggtggaagggaatcaccttgtctcagatgagactttggacttggacttttgagttaatgctggaagaagttaagactttgggggactgttgggaaagcatgattcatttttaaatgtgagaatgacataatatttggaaggggctgggcagaattatatggtttggctctgtgtctccacccaaatttcatcttgagttgcaatccacatgtgtcaaggaagagacctgtggggaggtgattgaaccatgggggtggattttccccaacctgttctcataatagtggctgagttatcatgagatctgacagtctaaaagtgtggcacatcctctcttgctttctctcttgccaacatataagacatgccttgtttccccgtcagccatgattgtaagtttcctgaggcctccccagtcatgcaaaactgtgagttaattaaacctcttttctttataacttacccactctcaggtagttctttatagcagactaaatacagactaatccatggggaaactggaaagcaaggaaggaaaacctcagaaaataggaaagattttaaagcagctattctaactatgcccaaagacataaagtaaagtatgctcataataaataaagagatagggagtctcagcaaatgagtaaaaattacttaaaaaagggaattctacaatggaacattacactacctaaaataaactattggagaatgaggaaatggaaatagaaaaagacaaaacaaaaattaattcattacaaaagtcaaaaaggaaaagaaattaaaaagaataagcagaacaaatagcagtcatagcaaaagattaaaaaataaatcaaattgaagccacaaatgtaaaaggaggaaactctccatataaaacatgacaattatcaggcttgaataggtagatagaaagatagatagatagatagatagatagatagatagatagatagatatagatgaaatagatagatagatagatagatagatatagatgaaataaagacacacaactgaatccaattgtatgaaaatcaattgaatactggatttgaaaagcatagtatctactggaacatttttggaacaattggggaaataaaacatggacagaatgttagataatattgctgaatagatgttaaaaggtctaggtataataaaacgtaaaagatttatatgatctgaaaagaaaccagagtatagtctagatattacaattacattgtgattatggaagagagtgactttattcttaggataaacctgtggaagtatttagggaaaaagttaagttatgctttcagcttacctctaaatgattcaacagataaaaatgtaccatatttggaaagacagtgaaacagagaaggtgggggagagaaaacaaatgtgacaaaatgataataaatggtaaatctaagtgttggatttatttgtattatttcagtttttctggttgtttgaaaatatttaatataaagtattgagaaaagtaaatacatgttagtaaaaagaagcaagataataaaacctttaaaacatcattgaaaaatattcatgtatatgctcatgtgggggtctatgctattcccaagagatccagataaacttcctaaaatttctaccacctaaccctttttttttgtttgttttgttttgttttattttgttttttgacagggtcttgctctgtcacccagtctggagtgcagttgcccaatcttgctgatcttggttcactgcaacacttacccctcaggttcaagtgatgctcccacctcagcctcccaagtagctgggactacagcacacaccatcatgccctactaacttttgtatttttagtagagacagggttccaccatgttgtccaggctggtatcagactcttgagctcaagtaatccacccaacttggtctcccaaagtgctgggattacaagcatgaaccacaatgcccagcctaacccaattctaaaataagactttaggagagtgaatttattaccactgaactgtacaattagaagtggtaaagatggtaaattatgtatgcatattttacctcaataaaaataaattttgttttattttaaataaaaacaaatttaaaagagcgtaaagaaatttaaaaaaagattactcatatcttactttcatctgatttaggatttactcttgaacaaaactagttatgagttaactatatcatgatattgaccagttctagttgtgaagtgatttttatgttgattcgaaatctatctcaccattttttcccactcttattatgtgacctttgacacatcactatcttttggtatctgcagaacttaagtagttaagtaacagaaaatccaactcaaaataatttaacctaaaaaggaaatatgttggttgttgaacaaagtattttaagattagtgaatcatatatggctgtatccaagaactcaaatgatatcatttgatttcagtttctctttagtctcagctttcctctcttttggcatcctattgatggtaagatgtctatcatcctcttccaattcacattctctcagctaccccaaggtgaaaataagttatcttttatcgaatttccaacagaagttccaaaaacttgtcttatttacacacaacaaaaagatttatgctcattttacaaggacacaaagcagccaagtggaaggtgtgcttcctaaaacatgttatgggaggagggaggcagagcaacatggtggaatagaaggctcccctaattgtccccctcacaaggacaccaatttaacaactatctacacaagaaaaacaccttcatcaggtgagcactcacagtacctcgttttaacttcatatcgctgaaagacacaatgaagagatagaaaagcagtcttgaatcacccaccacacataccctacttcacctacagtggtagcatggtgcaaagtgtgtttttttgtgctgtcaaagggacagagcagcaattagcaggcactgaactcagggctgtcctgttatatagcagaaaggaaaaccagaccagactcagctcatgtcctcccctggagggagcacttaaaccagccctagccagaaaggaatcaccagttgcagtggtcagaacttgagttcctataaacctcaccactgcaggctaaggtgctatggggccctagtaaacttgaaaggcagtctaggtcacaaagactgcaacttttacccaagtcttagtgctgaactgggcccagaaacagtgaactagtggggcacatgagctaacaagacaccagctggggcttcagaaggagtgctaacatgaaccctcccctaactccaggctgcacagctcatggctccaaatgagacctattcattccacttgaggagaggagagggtagagtggggagaactttgtcttcatcctggataccagctcaaccacaacaggatagggcacaggttaaagttgtaaagccctctttccatgtcctagcccccagaggacatttctaggcacactctgtgccagaaggcaacccactaccttgaaaggaaggacccagaattggaagaatttatcacctgctaactgaagggcccctggtccctgaaaaaccagcagtgatacacaggtactatgttgagggccttgggtgaggctctgagaattgctggcttcaggtgagactcaaaatattcccatctttggtgactatgggttttcagaaaaacagagggcaaagtaaaggggactttgccttgcacttaggtactagctcagccacaggagagtagagcaccaagtgggttctgagagtactcaattccagaatttggctcttggacagcacttttgaacctaccatgggtcagaggggagcccactgccctgaaaggtgagtctcaggccagcaagcattttccacaagttgatgcaagagcccttaggccttcagggaacatcagcagtagtctggcagtactccccatggacctgtggtggtgatagcaatacgatgaggctcctttgccttctaaaggagacaggagagttggaagaaatgcatcttttggtttgagtgccagctaaactgcagcacaaaacaataccaagtagacatctaaggtttttgaatctagtccctggctcccaggtgacacttctggactcacgaggggacaagggtaactccttgccctgaaaggaagaatacaagactggctgacttcaccacctgctgattgtagacctccgggaccttgagcaaacataggcagtagcaggaatcggttaccacaggccttgggcaacacccagtgctgtacaggattcaggtctgaccaagtacagtcatagtgctggtggccacaggggggcttgtgtcactccaccccccagttttaagtggattagaaaagaaagagagagagaccctgttcatttgggagaaagtaaggaaagagaacaagattctctgcctgataattcagagaattcttctagatcttgtccaagaccatcaaggcagctcctgtacaagtgtgtaacaatcacagtattactgggcttggggtaccccctaaagcagacgcaactcagatcacaacagtcaagtaatttcaaatgtctaaaaagcttcaccaacagagacggctacaaataagcccagacagtgaagactaatataaatatcaactcctcaatgcccagatacagatgaacatctacaagtataaaggcattccaggaaaaagatgacctcacaaaatgaactaaataaagcaccaaggacaaatcctggagaaactgagatatttgacctttcagagagagaattccaaatagctgttttgaggaaactcaaagaaattcaatataacacagagaaggaattcagaattcaattaaataaatgtaacaaacagattgaaataattttaaaaaatcaagcagaaattctggagctgaaaagcacaattggcatactgaagaatacattaaagtcttctaatagcagaactgatcaaacagaagaaagaatccatgagctattagtgagtttaagataagctagttgaaatgacagagaagacaaaatagaaaagaataaaaataatgaagcatgcctacaaaaactagaaaaatagcctcaaaagggcaaatctaacagttattagccttaaagagatggtagagaaacagataggggtagaaagatcattcaaagaagtaataacagggaacttcccaaaccccaatatcttatactttgatatatcaatatccaactacaagaaagttatatagcatgaaggagatttaacccaaagaagaaatacctgaagaaatacctgagaagcatttaataactaaaccaccaaagatcaagaataaataaaaaatcctaaaagcagcaaaataacataaacaaataacatacaatggagctccaataatttggcagcagacttttcagtggaaacctgacaggccaggagacagtggcatgacatatttaaagggctgaaggaaaacgttttttaccctagaatagtatatctggcaaaaatatccttcaaacatgaagaagaaataaagactttcccagacaaagaaaggctgagggatttcattaacactaaacctgtcctacaagaaatgctaagggggtacttcaatcaggaagaaagggacgttaaagagatataagaaatcatatgaaggtacaaaactcacttgtagtaagtactcagaaaaaacacaaaatattataatactgtaactgtggtgtgtaaactactcttatcctaagtaaaaagactaaatgatgaacccattaaaaataataactgcggttgggtgtggtggctcacacctgtaatcccagcattttgggaggctaaggcaggcagatcacaagatcaggagttcgagatcagtctggccaacatggtgaaaccctgtctctactaaaaaaaatacaaaaattagcagggcatggtggtgtgtgcctgtaatcccagctactcgggaggctgaggcaggagaattgcttgaacctcgtaggcgaagtttgcagtgagccaagatcgtgccattgcactccagcctggggacagagcaagactccatctccaataataataataactacaagattttaatacatagtcaaataagatataaatagaataagtaaacaaaaagatacaaagcagtgggatgaagttaaggcatagtttttattagttttctttttgcttgcttgtttatgcaaacagtgttatgttgttatcagcttaaaataatggattttaagatagtatttgcaagcctcatggtaaccccaaaccaaaaaacaaacaacagataaacaagtaaaaagcaagaaaataaatcatatcaccagggagaatcaccttcactaaaggaagacagaaaggaaagaaagaaagaagagaagactacaaaacaaccagaaaacaaataacaaaatggcaggagtaagtcctcatttatcaataagaaagttgaatataaatggactaaactctccaatcaaaagacatagaatggctgaatggatcaaaaagaaaaagacccattgatctgttgcctacaagaaacatacattgcctaaaaagacacaaaagggctgaaaataaagggatggaaaaacatactccatgccaatggaaaccaaaaaatagcaggagtagctatacttatataagaccaaatatgtacccaacactggagcacccagatatataaaggaaatattattagagctaaaaagagagatagcacccaataaaataataactgaagacttcaacatcccactttcagcactggacaggatcttccacacagaatattgacaaagaaatgtgtgacttaatctgcactatagacccaatggatccaacagatatttacaaacatttcattcaacagctgcagaatacacattcttttccccagcacatggatcattctcaaggattgaccatatgttacttcacaaaataagtcttaaaacatttttaaaaattgaaataatgtcaagtaacttcttggatcacaatgaaacaaaaccagaaatcaataacgaggaatttgggaaactatgcaaataaataaaaattaaacaatatgctcctgaatgacatgtggttcaatgaggaaattaagaaggaaattgaaaattttcttgaaacaaatgataatggaaacacaacatgtcaaaccttatggaacacagcaaaaacaatactaagacagaagtttaaatctataagtgtctacaaaaaaaggagaaaatgttcaaataaataattgaatggtgcattttaaaggagaaaagcaagagcaaacaaacccaaaattagtagtagaaaaaaaagatcagagcagaaataaatgaatttgaaatgaagaaaacaatacacaagaccaatgaaacaaaaagtcagctttttgaaaatttaaacaaaattgacaaatctttagctagactaactaagaaaaaaagagagaagatccaaataaataaaagcacacatgaaaaaggagacattgcaactgatgctgcagaaattgaaaggattattagtggccacaatgagcaactatatgccaaaaaattggaaaatctagaaaaacagacaaattcctagacacatgcaacctaacatgattgtaccaggaagaaattcaaaacctgaacagaccaataacaaatagcaagattgaagccatagcaaaaagcctcccagaaaagaaaaactgaggacccagtagcttcagtgctgaattctaccaaacatttaaagaagaactaataccaatcccactcaaactattctaaaaaatagaggaggaggaaatacttccatatttattctacgaggccagtattactttgataccacaaccagacaaagacacatcaaaaaaagaaaactgcaagccaatatcactgatgaatataggtgcaaaattatcaacaaaatactagaaaaccaaattcaacaatacattagaaagatcattcatcatgtccaagtaagatttattcctgggatgcaaggatggttcaacatatgcaagtcaatcaatgttatacattgcatcaacacactgaagaacaaaaaccatacgatcatttcaattgatgctgaaaaagcatttgataaaattcaacatcttttaatgataaccctctcaaaaactggggatagaaagaatatatctctgtataataaaagccgtatatgacagatccacaactagtatcatactgaatgggaaaaaactgaaagcctttcctctaagatctggaacatgacaaggatgcctacttttaccactgttacccaacacagtactgaagtcctagctagagcaatcggacaaaagagagaaataaaggtcatccaaattggaatggaagaagtcaaattatccttgtttgcaggtgatataatcttaaatttgtgtgaccttaaaggcttcacacacacaaaataaaactactaaaactgataaaagaatttagtaaagttgccagatacaaaatcaacatacataaaacagcaacatttttatatgctaatagtgaacaatctgaaaaagaaataaaaagataatcccatttaaaatagccacaaataaaattaagtgctaggtattaacttaaccaaagaagtggaagatccctataataaaaactgtaaaatactgatgaggccgggcacagtggctcatgcctatattccccgcactttgggaggctgaggcaggtggatcatatgagatcaggagttcaagaccagtctggacaacatggtgaaaccccatctctactaaaaatataaaaattagccagacatggtgacaggagcctgtaatcccagttacttgggaggctgaggcaggagaatcacttgaaccctggaggcggaggttgccgttagctgataatgcgctattgcactccagcttgagcaacaagggtgaaattctgtctaaaaataaaaaaaccgatgaaagaaattgaagagaacaccaaaaaattaaaagatagtccatgtttatggattggtagtatctatctatctaatatatatataatttttttttgaaactgtgtctcactctgtcacccaggctggagtgcagtggcacaatctgctcactgctacctcgacttcctgggctcaagtgatcctcccacctaagcctcccaagtagctgggattacagtcatgtgccaccatgcctggataatttttgtatttttttgtagatacggggttttgccatgttgcccaggttggtctcaaactcctgggctcaaaaactgcccaccttagcctcccaaagtgttgagactacaggcatgagccaccatgcccaactcaatattgttaaaatgtccatgctacccaaggcaatctacagatttgaggcaatccctatcaaaatgttaatgacattctacacagaaatagaaaaaaaaaatcctaaaatttatatggaaccacaaagacccagaatagacaaagctatcttaaggaaaaagaacaaagccagagaaataacagtacctgacttcaagttatacttcagagctatagtaacaaaaacagcatggtactggcattaaaaacagacacatagaccaataaaacagaatagagcacccagaagcaaatccacacatctacagtgaactcatttttgacaacggtgccaagaatgtacactaggaaaaagtgtctcttcaataaatggtgctgtgaaaactggttatacatatgcagaagaataaaactagacccctatctcttgccatataaaaaaatcaaataaaaatggattaaagacttaaattttagaccccaaactatgaaactactgtaagaaaacgttggggaaactttttaggacattagcctgagctaaaatttttttagtaataccctgtgggtaatagtaataccctattaagttgcacaggaaacttaagcaaaaatgacaaatggaatcacatcaagttaaaaagcttctgcacagcaaaggatacaatccacaaagtgaagagatgacccacagaatgggagaaaatatttgcaaactatccatctgacaagggattaataaatagaatatataaggagctcaaacaactctatagaaaaaaaatctaataatcttatcaaaaatgggcaaaagatttgaatagacatttctcaaaagaagatacacaaatggaaaaccagcctatgaaaaggtgctcaacatcattgatcgtcagaaaaatgctaatcaaaactgcaatgagatatcatctcacctcagttaaaatggcttatatccaaaggagagtcaatagcaaatgcttccaaagatgtggagaaatggaaacccatgtacattgatggtgggaacgtaagttagtacaaccactatggagaagagtttgaagatttctcaaaacactaaaaatagagctaccatatgatccagcaatcccattgctaggtatattcccaaaagaaaagaaatcagtgtatcaaagagatatttgcactgccaagtttgttgtggcactattcacagtaaccaagatttggtagcaacctaagagtccatcaaccgatgaatggacaaataaaaagtggcacatatacacaatggagtactatttatccacaaaaaagaatgagatcctgccatttggaacacatagatggaaatagatatcattatgttaagtgaaataagccaagcacagaaagacaaacattgcatgttcttacttatttgtgggatttaaaagtcaaaacaattgaactaatggacatagaaagtagaagtatggttaccagaggctggggaaagtagtggagttggggtagaggggaatttgggatgattagggagttaaaaaaatataaaaagaatgagtaatacctactatacaatggcataacagggtgactatagtcaataacaagttaattgtacctttaaaaataattaaataagtatacttggattgtttgtaacacaatggatgaatgctcgaggggatggataccccattctccatgatatgattattatgctttgcatgcctgtatcaaaatgtttcatgtaccccataaatatataccccataatacatacacacaaaagttaaaaaaataaaacaaaataaatagaaaaattcgcaatcatagtttcagattttatcacccctttctcagtaattgatagcataattagactaaaattcagttaaattatagatttgaatgatactattgactcccttgattgaattggcataataactgctgaatacacatttttctccccaagtgtacatggaacattcatcaagatggctcatatgctgggtaaaataacaagtctcaataaatttcaaaagatccaaatattataaagtgttttctaaccaaaatggaattaaatttgaaattaataagctatttagatttttttttaaaaaaagaaatattacgggagaatgttcctgaaatctagcacatttcatactgaacagtaaaagactcacactccagggattcagtattttttctcttctgtcaattaaaggaatttgattgttaatttaaaaacccagtctttataagtatgtgattctgattttattgtaagtgtttgttcctggtggttttggttttggagcttgcatactcccacaccaagaccctaagagtggagctacaaaggatggagcctgtctccattcactttggaggcctgcagaaaaacccaacactgtttttttttttttccaagttggataaactcttaacgtttcacagtggggtgttgattttcctggccagcctgctgaactctggtaacacaagactgctggtccccagggaaccactatgcatagtatgcctaagatgtggcttggagctgcagaaacccaagtggggccttccgttttcagtaaagaccaggaaatctctgatggtgtcctacattcctctgcttaataccaatccctcctccccactaaagaccatgcaagtggttcatgtaaatcgccctggtctgcctgccaacattccaagtgcttcagaggaaatgtgaacactctgggtgcctaaattttctttgaaaggtcacgggcaaatgtgggctataaatgtcctggcattacagctggtctgctacccctgcttaggatacccagtactcaggctgctatactgaaaccttcatagatttagctttcctggatttacaattcaagccagatgcttatggtgtaagaaggagtggaaaggggtggtgagattttacatgtagggggaagataacgcagttgttaacaggtttgtcttttattctcaggagtgtagtctcatccctagtgcttattacatgccaggcactattctcaggaatgccctggtttgaaagataaattatatggttatcctagatataaagggcttatccaaagtagcacaggtaatcaacttcatattgcaaattcagatcacctaacttctctacagtgttcttttccctaagccataggcgcctctcatgaaaagtgctaccttcctctttctcttaaaagacctctctctctctacaaagacctgggacacacacttatcccttcctgcctctagcacagaaggtgaaaggctttctcagtttatttcattagcacctgagaaccattagttatgcttcaatggaagtatccgaactttagcacatgctaaattgaacttgatttttatctttcactgggaaatgttactgctttttgacaaaagaaggtaacttaatttctttgttggggacaaggggaaaattcaaaccttgtttttaggatctaacttcggcaaaatgtaaccagagtcttgcatatatgcatgcatgcacacacatacacaaacccctccttaatctgttttatctcaaccattgtgtacatagtggttgccagagatgaataactcattaatcttctttaagacaattagccagtaaattcaagctaattagctagatctgggttgagtcaagaaagctatttgttggaactggtagagaatttgtaggggcaaagttagaacaaggtaggaagaaagccaggatcagcagatgggagactccaagctctgcagggttgctacatagaattctcttcagaaatgccactggcctcaaggagcagcccaaaggtacaaggtactgcctcaaagatgtttgatttgcagaatactgtcaaattccatgtcttcattgtgccttctgtccttctggctttgaaggatagagagctggagtgagttcccaactatccccagctaggaaagaaggaagaaaatcaagcttcctcataaggaaagggaatttgagtgtctaatatgtactcttcactcattcatgttaagtagataacaaaacagagtcaaagaagacaggtgacaacccaagaccatccaagtagctagtatcagaagcaaaagactgcagccctgtactatgacatcccgttctccctgagagcatcctttaaagagtttgtggtgaatccaacctactaggacccagggagatcctagcgtgggaaggaaggagactcaagagcactgaattcagtgagctcttctgtttatcaataatatggctttgggcaagtcattccaattctctgagcctcatttttttcatttctatttgaggaaaatgatttctttgtcatagtcactgaaaacgttgggtaaaattatatgacgaaaacatccctagtgcttcttacatgccaggcactattctgtgggctttacatattataactcatgtgatcttcacaatatatctacaagctagctaccactaccatcatcaattaataaaggaggaaactgatgcatagggaggttaagttgagcagctagatagtgattcagagtggattcagacctggatggtctgatttgtgagcctgtgctttaattactttcctgccttttctaacttgcatactggcttaaatggagtttaataaatgctcctttaatgctgctgtttattcatccaatatatagaagctcaggacagaaaataggcaaaaatggcctgttagtatttatctctaacttgaactcaagatgaagagactgatccatgtatctttccccctgcccattacctgtttcaaaggatatagctgtcagtctttttcttggagatatagcatagagtttagcaaagacacagtgaaccaaagaaaatgcaaatctatcaaaatctcatagactccttttcatgtgtgttccaagcactaagagacacaagcatgcgataaggcctatctcaggcttgcaaacaataagagctcaaatcacacttattagaagaaattgaatttacatggccaactcaaaggggagcttgattctaggattacttcctttcaatgtctatttagaaaaaagtccccctttctccagatgctctcagaggaggggatgaaaaaatatctcctgttgggggatctcctgctactgactccatctccaaacatcaccctggaggttttgcaaattggcacagcacttatgaataatcagccacaaatgaagagtaaagacatgagctcttttttggaggaatttctttcctctagcttccagctgatcatttaagatggttcctggtccctcccacaaggtatgtcagcttacaagctcagccaatgtcctggacaaacaaaatctacttgaaacctcatcccagaaatcctgactttaagcctagctcgtcgtgagcattcctgctgcatggagataaatatgctctgtgtattatctcataagatcctcacaatgactttgtaaattcaggctggattattatctccatcttacagtaggaaaaaaatgaatggcaggatgattgagtaaatcactgcaggtgacatgcagtgtaaacagtgcaactgggttgtgagtttaggtcaatcccacacaatgcctctttctttaaatgagataaacccttgggtcaagcgctgtcatttccataaacttttatccaaatgtgaatgtctttgctgtaagacaaatcaggcaggggttattaatgtatcacattttcatcttccataatatattggattcagaaaaacttttacatcctaagttcttgttacactgttctggggtgcaaaatgagataggaatggaaaagtggacaacaaagaacagtgaagaaacttagaagtatcactgcatttccaattttgcctgagctagccctatcaaagccagtattcattattaaggaatcagagaggtgaaaagtatataaccaagatgaaagtggaggatttcaagggttaaagtctctatttactagtgaaggcaactactagccacttagaatttgggttattttgttgttgttattctgcatcctataaatgcagaatgaacatttatttgaagtgcaaatggaacatttaccaaaatggaccagctgctgggccataaaaaaagtctcaataaattgcaaactattgaaaccacatagagcatgttctctgactagagggattaagttagggatcaattaagcaaagaagataaataaaattcccaaaatgcttcaaaggaggcatttttaaaaatttaggtataatttacacaaaataaaatttactcttttcagtgtgcagtttgccagtgttggcaaatgcatacaagcatgtaatcaccagtatcatcaagatgtggaacagtttaatcccacacaaagttcccctatgtctcattatagacaactcctccctacgaccctagcctctggcaaccactgaactgatttctgtccctagaattttgcatttcaaatctggcttcttaaaatctcccataaggcatttgaggttcatctatgtgttgagtggatcagtagcatgtttcttcttattgctaaatagtattccattgtatggatgtgccacagtttatccatttacagattgaatgacatttggtttattcccagtataaggcaattataagtaaagtcaagataagtctttatacagagaatctctgggtctaagtgtatattcaacttaataggaaactgccaaagttttccatagtagctgtgatatcttgcattctcatcagcaatgtatgagggttcccattgcttgacatcctcatctgtgaagctcttcttagtttattaagtctttctaacaagtatgtagttgtatgattgtggttttaatttgcaattaaattactaatgatatttcatgtcattttgtcattggtatttatccattggtgaaatgtttattaagttcttttgtccatttttaaagtagactttttaattattaatttttgagagtcctttgtagagtgtagttatgagtccttcaggaaatatgttttttccaaatattttctcccagactgtgtcctgtctcgttttgttaatgaaaatgagcaaaactttaaattttatgaagtctactttatcatttttaatttttttatttgtttaatttttgtgttctatttcagaaatcactgtgtaccacaaggttgcaaagaatttcttttagttttcttcataatcttacaaaattatattccaaaattctcctttccatagtttatgcaattattgccatccattttacttctataaatgctatggacacctaacatcttgctattcctttttgctttagacagtcaattttcttttttgtgtgtgtgtggatcaaaatttctgtctagcatttcttgctgaagcgctttttagtatttcttgtggtgcagttcagccaataagagagtgtctcaatttttgtttgaaaaaaatatttcttctttatttttgaattttttgagtgtgggtctgggtgtaatagtctaggttgaaagtggttttgctttttttgtttgtttgtttgctttgctttcaggactttaaagatgtcacttgattttcttcttgcttgtgtagtttctgacaatatctgttttaattcttgtatatgttcctttgtatataccatatttttcctggtatctttaaatattttatctttatatatgattttcaaaatgtcgaatatgctggttgaagagtgtttgtgtgtgtgtgcacgcgcacgtgcactgtgtgcacaatatatgtgtttccttattgatcctgcctggtgtatggagtccccgggatttctgggctagtgtcatcttccacatttccaattacaccaattacatatacgtttgtaagatattttcccatggttcttggataatctgttctttttattttccactcttgtttctgtttttttatgtgtaaatttaaacaaactgttcaaaagctattttttatgtccattttcatttatatctaatttcatgtttataatttcttctaatttgtcttcaagttgactgaatttttccatggctgtatcgagtgtactaaaaaactcatgaaagatgttctttatctccgatcccatattttaaatttctagcatttatttgattctttttcacagtgtccatctctgtgttgaaatttctcatgtgttcatgcatgttgtccatgtttttgcactggaatctttgctgtgttgataatatttgttttatatttccagttgtttcattgtctggatgatattttagtctggttctcttgattgtctgtggaatgaagtcaattattacaagaatttcatggatgcagaaactgaggctcaaggaggttagatgagtactcaaaatcacggagccaagaactgatgaaatgaagtcaaacaaatttcaggctttatcttctgcccactaaactgtgctgctctataatatggacacaataaatagctactgaacaggtgattacatgacctggaattctcaagcataaaaatctgtccaatgttgcccaatagaaatgcctctggggacccaaatcttgggacacagctgagtgggaagccactaggagcttatacctatgttctgatggtgtagaactatttcaaaaccccatgagaatgtatgcatttggtaggtaagtgtcactgtggccaagtgaaaggtatgttcatctctttactcacttactcacctgcccaagcagcacaggatctggaacagtcagaggacgagactgcatggaaatatttgacataagccttatagacgcctctctcaccctaactcttcactgaaaaagcaccatttgttttttcaccgaataatcatttgtagcatacaaaatgagccatgtgatttgtttatttccttattaaaacaaacaaaaattcgccgccctgttctgtcccacagccagggctaccctggctataagccagctgtgtggctctgcaatttcaggcactggaatgagctgggatggggcctgcaggctttttctagctccaaaggcacagttgtctacagattcctcatggatcaggaaagctggggtggggctggcacacacagtcaatggtcttgtaaataaatgtgttcggcccattccagccagtagatagtgtatcacaaggcaaggccatttacatatggtcccctgggcctaggtcaggcattgaatcaggcatgttacctgccagacagctatagtgaagatagattagcctcctgggtgtcaggtatatgcatagcacatgaacttcccccaagaaagcaagttggcctctccagaagaccccctgggactgtgtctttgtggcctaaattccagcagggagcagccacagacctcagacttgcttcttcagtttagaagatattcttcaaggatggcttctggtatcagaggtctcaagtaagtgtgtgtaaaatatttcagtgttggacctaataaatattattcttaaggaaataattcaaaaaacgaatacataggcaaagatgttacttatagtaaactaagtttataacattaggatggtgacatatctatttaatagactgtcatgcagctattaataattttgccccatatttaaaactttagaaaaaaaagacactagaaggagtgaaaatatcaaagttataatagatgagaatttcccagagatataaaggtcacaagtattcctattgaaagggtatattaagagtttagagtaaaaggaaaggaagagccaaacctagggatattactgtaaaatttcaaggattaagaataaagaggagatccaaaaaccttgcaaggtgcagaatagtcacctacaaaagagtaagaattaatcggacctcaaattttccattagcaatattgtatgcttagggctactttatctttcagacattgagacacagtgcctggggcctatgagttttttaagttctatggaaatattttatagaagagaaactttattctagatatatattatatataataactatatatatttctatagatatataatgtatatgattgtgatagaatatatatacacacatatatacacacacacacatatgtaatatatattgttaatataaatttggtctttgttcgcagtttctgacacagagttacaaaaacccttgtaattttacaatagtattaccaagctaggcctgttctacccatcatgcagtatgacaatcactgagataatgagttttgcagtaaagatttttttcgctaggtagccagcaagcagatgggaaaccagatctcaaattcacctccctgaatatagggcttaggcgtatttacaggataaagaagcaagctggtcatggagaaaggtgattggcagtgggaaaaaatgaggtaatcagtggtttgtgcaagaatagacagagtttgtggcttttcataggacacatgtgcattcagaaaatggtggcatcagcataatctgagggaggaggtttgggccctctaacatcaaaacgtgacctctcaggtatttgcacctgcccagttgaagcgttagtggtctccactggtttaaactggactcgttcttgaaaaataactttaagcaatcattaactatagtgatatatatgtcagagatgttatctacaagaaagctagtaggagtatagttatatattgtttgactgtgttacttttagccacataggttttaagatcaactggaagtaaccaattaaaaccacacaagtggtttggtagacttaaccaggttagcctttagtttcaatagagtcatcttttgttctaatatttagtctttgtacctcattcctggcacataactcctaaaactcagaatctctggagtggtaagagtgtctttagtgtgctattgacatgactggtggcctctagagagcttcgggatgggggctggtggccagaaaaactaaggcatgattagagggttgggattttcagttccactctccaacctctggggataggactggagatttagataatcatcaattttcaataatttaatcagtcatgtttatataatgaagacttcttaaaactccctaaatgacagggttcagagagcttcccagttgatgaacgaatccacatgcagggagggtggcacaccccaactccacagtatagaatcccctgggctcaggacacttccagatatgaccctatatcctttataataaaccagtaaatataagtacagtgtttccctgagttttgtgaaccatcctagccaattatagaacctgaggtgaagtatggaaatccctggtttatagccaattgttcagaagtacagatggcgatctgagacttgcaactggtgtctgatgtgtttctgtctcacgggactgaaaccttaacctgtggggtccatgtcacctctgagtagttagtgtcagtgtggatttgaacggtagaataaccagctggtgttcagagattaggagaattcatttttggtgtggaaaaactcacatatttgatgctaaagtactgtgagtaaaaagagccaaatatataatatacagagatgctatatccatattacatgtgtgtatatgtatatagattgagattcaaaactataatactatactataaaatcaagtatgagaaattattaaatatgtatgtagataatattatactatgatactttgtagtatgtttcatatgagaggtgggactccaaaacttacagtaccttggattaacaaaaattccgaaagtcttgctagcaatctaattctaggccctaaaacctaacaattacaagggaagtatccctcccctctagatttgcaaacccaaccaaactatcaaccaaggcataaggatattatgaaaacatttttaggtgagacagaactcagacattttaagttaattttaagtttctgttagcatttgaatgctgataactaattacatttttcatctttctccaaagttagtagccagttaagaaatatatacaaaaagctgaatgatcaatttaaaagtgatctatgtcgttgacagtactgaactggacctatggccatttgggtcccttactaaaccctcgatggatcttaaatctggagtttaggatcaatcacctgagggattttaagggcagtcagtcggtctttccagaatcatcgctttgcctggatgcagtatagaaagggcctcgagctagacattaaaggaagacttggttcctgacccaggtgtgcttgctatttgaaatagatccagaatgccaacagctagggcaggcctccttgaaacagaaatcccagaaggggctgagccacatgttctttctacattattcaccataaaagtaagacttttttcactgggaacaagggaataaacaagagacaagccagaagaatttcctccattcatgttttctctttttcgcctagggcagtggtgctccaagtgttgtccttaaaccagcagcatcaacatcacctgggaacttggcaacaacaacaacaaaaaggaaattctggggcactagctgagcaacttagcaaattagaaactctaggaaaggaactcagtgatctgcgtttccataagccctgcaggtaattgtaatgcactattatggtggagaaccactgtcatagagcagtaatggaagtttatttccttttttggaaatttgaggctaaagaagattcccccacccaatcaccccttgagattgtatgcctgataaatgaagtcataaactgaacatgacatgaggtctattcaagagtagctccaacccagaagaggagtgtctggaagtgaaaggatagctcatgtgcagtgtgcctaggaaacaacctgcctagaattgactagatggatggtgggctcaagaaaggaggatttgatagaagagtcagtgtaattgagaaaagctaatggatctgcaataaagcacgagtcaggcacggtggctcacgcctgtaatcccagcactttgggagactgaggtgagcagatcacctgggctcaggagttcgagaccagcctggtcaacatggtgaaacctcatctctactaaaaatacaaaaattagctgggcgtggtggtgtgagcctgtaatcccagctactcgggaggctgaggaaggagaatctcttgaacccagaaggcaggggttgcagtgagctaagatcgcaccactgcactccagcctgggccacagagtgcgactccatcttaataataataataataataataataatacaaccggctgggcacggtggctcacacctgtaatcccagcactttgggaggctgaggtgggcagattacaaggtcaggagatcgagaccatcctggctaacatggtgaaaccccgtctctactaaaaatacaaaaaattagcagggtgtggtcgtgggcacctgtagtcctagctactagggaggctgaggcaggagaatggcgtgaacccaggaggcagagcttgcagtgagctgagattcgtgccactgcactccagcctgggcgacagagtgaggcgctggctcaaataataataataataatacaataaagtaccaaggaaataagaaggaagagaggaatggagagaggaagaagaaaagaaagatggaagagaaggaaggagagagggagacatggtgacagaaaagaaagatgaagaaagaaataatagataatcagcaactcaagaaaaagaaaaatacttcataaaaaacgaaatgagtcaaaattaaatatgacatggatttgagcaactagggccatatcaacaaaaaaggaaactctgtttcctctgaagtaccaccagagtggtgacattggaaccttagggatcacagtagttgtctttgtggtatcatcataataatacataacactggttgttgtttcccaacttttagaatcaatacacaggcaatgaacaaaaaactaaactgtggctacaaaacataaaaaagatgtagtcaatccgaaaggtgtacaaagtaaggtacaaccaacaaaggtttggaggtaggaggtatgaggtatgaggagcaaacacaatgggaagaatgggaatcctcacttcctcatcattcgacatagtaaacaattgtcaatacctgtgcagcaagagatagttttaggtaagcttctcaattttctaagtcaccagttggagaaaggtgatgcatgtgggcataggtgactctattagatgaagcagagcaagaaagaggaagtagtatactgccacgatgcatgcaaacttaacattatcaaggttaataagctggatatcaaggcttttgcacagattgatatatgttgctgggtaaaaacttacattgctttccatgggatttatatacaacagtgaattaactataaaggctaattcatttcgttgtgatgttttgagatgtcagcaatatcactttgttaatttccacaaagtcttccatatcttgaagcccggaagatagtgccctgagcttatgcattctttaacccaaacaatccatattagggacacatatggccttccagaggcactctatggtctttccacttttaatttttttagaaaaacaagatatcactctgttgcccagactatagtgcagtggcatgattgtagctcactgcagcctcaaactcctagattcaagtgatcctcccaccttagcctcccatgtagctgaaactataggtgcacatccaattaatttgtttatttttattggagacggggtctcactacatttccctggctggtcttgaactcctggcctcaaacaatcctcctgactcagcctctcaaagtgctccccacttttaatgatgtcttttggtggctgaagaaaaaagaagggaactttcttgtcagctttcataatacagtaatattacaccaagatctagtcccacccaccaaaagtagtctttgaatttcctcatgctgaattgactttacagtcttcctttttctccctaggtcttgaaggctcatgttaatagaaagcagtcctaagatgtgtattcaggattcaatttggtatttgctaggtaagaaatctgggcaagtttccttttgttttgtaataattccttttgatataatttttaacttgaccagattcaccctctttacttttcatttttgtttttgtaaccttttaagaaagagaaagccataccctgctttaggtatttgtttgagtttctaatgagtttgtagagatgaaaatactattcctattttaaagtcctgtgccaattccgggatgaaagatggagtcacagaaagggtatcttaagggaaatagtataataaaggcagtgaaaactacaagcaagagtgatatcatctcatgggtaaggctttgttacccatggaaggtgaaggacagcaagtgctgtactatgtgtcagcaccttagcatcatgggaaatgatcactttccaccgaggaagcagaaatggtggagtgtaagtgtggggatgccaatggcatagacagtgcttttcctaacaataaagggagagttaagagcccaaaatacttcactttgcaaaaatcagagtgcatgtgtcctggaggactggaatagagggggagctggttgaaaaatagaaaggaaactattaaaaatcgttgaattataacttaaagcgagccgatgtgatggtatgcaaattatatctcaatatggctgttcaaaacagggcagatgttgtgggtcaggaaaaccttgtataaaaaggtcaaggaattacaaatcttgggcaaacacttattgcataaaaataattgtatcaatagcttttttatttcactctaagtacatgtgctatatattttcatttgaaaaaaattaaaacttgcacttggaaaattatgcttcttttccaagaagctcttagctagcaactgtttgtgaggactttatcaagggaatcatcacgttttcatcattgaaaataacagaggccactgcatctcaaattattcccacaaatgggaacgaaaggcacttctctcctttagcatatggctaagttggcttccatcttctccatcttccagctaaagtgttatgtggcaaatggatattttctctaaaggtatcccaaagaaacctttccagggtaggcagctgcctcccatgcagcagaagcttatggaatagtgtaaattagggcatctccatgtcactagacctacagagtctatggaaggttgctaacttacctagtgaattccaagcatggaacaaacagttggaaagaaagagtctaaaagttcaaagaattgctgcttctctgatggcaagcaggcatgtgggaggctgggtcttggggtaaagagtcagagccacatttaggggaattgctgaaaacagattccaggagaaggtgtggcatggaacatcagatggctatttcacaaggcttttcaacctctggatcacaactgttctcttttttctttaattaggaaggattgtgtcctcagactttcttcagatagccccaaaaggccccatcctaggagtagaccagccttcctggctagcagaaatattactcaaaaagaaatgtaagtcatgacttccaggaacattgaggctcctacctcatttaccttaacccctatcgagtatgtttgccaggcttaaaagtatatattattattcaagtaatgcactattatattattttgtaaaaattcaaatatgtggaattttcagagtcaaaagtcaaatgtctttgacatctttgtcattccctttacctactctcctcatagtccccttcctagattcaggaataactagtatcaatttagtgtgtatcctcccgtacctttttctacgtttttagatacataaatattatatgcagaaatacagagttgtgttctgtatcttaacacagtaacagacactatgcattcttatgcaatttgcttttaaatgttaagtgttgcaatgttaaaagcaattattggctctctttgccctgtggcatacttatccgtaaaatgggaatgttataatttattttaccacttccttaatcacgtagattttgtttttcccccattttccattactataaacagctctgtaatgaaattttctatacttgcctttgagcatttttttagggaataaaatgtagattctgggttagagggtaagcacattatgcaatttaatagatattgtcaaaatgccatcctaaaaaactgtatcaaattatactcccaccacagtcttaacctattctaggaaaaccattttagaagataggaaattttagactcctgggtctaagttcttggcttcagaagcattgggccataggagctcagatatccatggaaaccttcttccaaggaggcaatgtttccagacccaccacactttacggtggtctgcaaagaccatgccaaggattgtgatttctcactaggactccagtgagggagtcagatccccacacctttttatgtactctttctaggtgaattataaccaaaatcaaaatttggactaaaatcagcctcctgtctttgttctgaaagtgtaagaaataaaacctgattttggaaaggaaaaagtgggtaaaaagaaaaaaaaaaacactgagaacaaatttcagcccatgtataggacagataaaaaaggtcaagtgattcatcttttttccctctacctaaattgctgcagcttcaatgcaacagaagtgactctggttgcaggaaccatcttcggttgggattaactgttttaggaatgcaagttagtatactggaattagaatgagcttgtctgggttcaagtccttgctctacatttattaccatatcagcttgaagaagccatactgttcttcttttccagctcggaaccttggattgttctcttcttggcacggaattctcttcttgcaaattttcctgaggctgactttctgttaccattcgagacccaaatcaaagttcttttcttccaaaaggctgttgctagaactattggaaaagagaatttatatttcagtttgctttcttgggcctatttatgctgccttaaagaaaagacaagcctgagcacaaagccagtacaaaatactgggagagccatatttttagtaatatcttctgagcatccatatcttaaaaagccttttgtctggcctatgtattctcacttactcttgaaggtagaacacatgcacacacacaaaaacacacacacaatcacacacatgtacacacacgtaccaattctatgtagcacaatggttttcaattttggctgctcattgatatcccctaggaagctttataaattctgatgcctgtgcctcacccccattgatactaattgaatttgtttgaggtgtgttgtaggcaacagaattttctgaagcaccccaggtgatcctatgaggtatgccaaggtagacagcaattggttcattggttcacaaactcttgtttccagataagcagcactggcatcaccagtgaagttgctatatttgcaaactcacaggctccactccagacttctggaattgaatagtccacagccagtatattttaacaaaccttccatgtgatgctgatggatgcttaggtttaagatcctctaatctagagaggtgatttggcaattttagccactacatggctttttgccattgtgagaaatttgctgctattagatgagaggtagatgaaactgcttgagtcctggccatgctttggagctagggagaggtagaagaggtgatgatgggtttcctgctgccttgacaagattagggagagtgatttaaacatgtctacttcagtgcaaggccagttcaataaaaaataaagtctcttctctaagagcaaagttggtatcacaacaaaggtggcaatagggcagcagagattagaagaggagtcattggcagcattggagaacgctagaggagttgcaccctctggggtataagatgtagagggttcttatggttcctgcagagggtgactccagaagggaccagtcaagctagagagaagtctacacaaccctattgccctctgctgggaaaaacaaagatttggtgtggatgtgagtcagggcatccagaaacgaggttttggcatcacagtgtgactcaccatatcttctttgccatttcttccaacagtcagagattcatgtgccaggtaagacacagcacattaaaggagaagcagcaggtcagtagaacaagtttaacctgttatattagtctgttcccacattgcaataaagaaatacccaagactgggtaatttataaagaaaagaggtttaattggctcacagttcttcaggctatacaggaagcatagcagcttctggggaggcctcaagaaactttcaatcatggtggaaggtgaaggggaagcagacacactttacatggtcagagaatatggaagtaggtgcggggactaacagattttatgctcacttactcactatacagtaccaagaagggatggtgctaaacaattcatgataactctacccccatgaccaaatcaccttccaacaggccctatctccaatattggggattataatttgagatcatattttggtggggaacacatattcaaaccaaatcattctgcccctggcacctaccaaatctcatgttcgtctcacatggcaaaatcccaccatgcattaccaatagtcccccaaattcttaactcattccagaattaactctaaagaccacagtccaaagtctcatctgagacaaggctagtcccttctgcttatgtgcctgtgaaataaaaaacaagtaagttacttgcaggatacaaggaagtacaggcattgggcaaatactccccttccaaaagggagaaattggcaaaaagaaaggggctacaggcctcatgtaactcaaaaacccagcagggcagtcactaaatcttaaagtttcaaaatgatctcctttgactccgtgtcccacatctttgcatgtgcactctcatgcaaagggtgggctcccaatttcttgagcagcatcacccctgtggttctgaagggctcaggtccccccagctgcttttaagggctgaagttgagtgcttgtggccaagtgcagagtgcaagctgtcagttgatctatcattctggggtctggaggatggtgaccctcttctcacagctccactagacagtgtcccagtagagactctgtgggagggctccagtcccacatttcccctttgcactgtcctagtagaggttctccatgaggactcctcctttgtatcagtcttttgtctagacatccaggcttttttatacatcctctgaaatctaagtagaggttcccaagcctcaactcttacactctgcatgccagcaggcttaacactacatggaaactgccaagggttatggattgcaacctctgaagtagtggcctgagctgtacctgggaccctttgaaccacagctggagctggaggagcaggggaacagtgtcctgaggctgtgcagggtgacaggtccttgggcctgatccacaaaaccattctcccctcctagggctccaggcctgtaatggaaggactactaagaaggtctctgaaatgcctttgaggcctttgcccattgtcttggctaccagcatttgccttctttttagttatgcaaatttctgcagcttgcttgaattcctcccctgaaaatgagcttttcttttctaccatattgcctggctgcaaattttgcaaacttttatcctcttcttcccttttaaatataagttccattttctggttatttatttgttcatgcatgtgagcataggcttttagaagcagccaggtcatatcttgaatgctttgctacttagaaatttcttctgcatgataccccaaaacatcactcttaagctcaagcttccacagatccctagagcaggggaactatgcagccaacttcttcactaacacaaacaaatgtgacctttgactatagtccagcactttgggaggctgagtgagcagatagcttgagctcaggagttagagactagcctgggccatatggtaaaactccatctctacaaaaaatacaaaaattagctgagcatgatggtgcatgcctgtagtcccagctacttggtaggctgaggtgggagaatcactgaatctgggaggtcaaggatgcagtgagctgagattgcaccacttcactctagcctgagtaacaaagagagacattgtcaaaaagaaagaaaggaagaaagaaagaaagagagagagcgagagaaagaaagaaagaaaaaagaaagagacatttgctctagtttccaataagtttctcatttccatgtgagacttcctaggctgagggcctagactttactatccatatcactatcagcattttggtcacaatcattcaacaagtctctaggaagttctaaactatccctaatcttcttgtcttcttctgagccctccaaaatgttccaatctctgctcattacacagtttcaaagttgcttccacattttcaggtatccttatagccatgccccactcctcagtaccaatgttctgtattagtccattctcacactgctataaggaaatacctgaaacttggtaacttataaagaagagaggtttatttggctcaagttccacaggctataatgaaagcatgattctggggaggccttaggaaagttataatcatggcagaaggtgaagagggggtcagcacttcacatggtcagtgtcaggcctctgagcccaagccaagccattgcatcccctgtgacttgcacgtatacgaccagatggcctgaagtaactcaagaatcacaaaagaagtgaaaaggccctgccctgccttaactgatgacattccaccattgtgatttgttcctaccccacattaactgagtgattaaccctgtgaatttccttctcctggctcagaagctcccccactgagcaccttgtgactcctgcccctgcccaccagagaacaatcccctttgactgtaattttccattaccttcccaaatcctataaaacggccccacccctatctcccttcgctgactctcttttcggactcagcccacctgcacccaggtgaaataaacagccatgttgctcacacaaagcctgtttggtggtctcttcacacggacacgcatgaaatttggtgccgtgactcagatcgggggacctcccttgggagatcaatcccctgtactcctgttctttgctccatgagaaagatccacctatcacctcaagtcctcagaccaaccagcacaaggaacatctcaccaattttaaatcaggtaagcggcctcttcttactctcttctccaacctctctcactgtccctcaaccactttctcctttccactcttcaatctctcccttctcttaatttcaattcctttcattttctgggagagacaaaggagacacgttttatccatggacccaaaactctggcgccagtcacggactgggaaggcagccttcccttggtgtttaatcattgcagggacgcctctctgattatacatccatgtttcaagggtgtcagaccacacagggatgcctgcctttgtccttcacccttagcggcaagtcccgcttttctggggaaggggcaagtacctcaaccccttctctccttgtctctaccccttctctgcttttctgggagaggggcaagtacccctcaaccccttctccttcacccttagcggcaagtcccgcttttctagggggcaagaacccccaatcccttatttccacaccccaacctcttatctctgtgccccaattccttatttccatgccccaaccctttctctgcttttctggagggcaagaaacctctaccccttctccgtgtctctactcttttctctgggcttgcctccttcgctatgggcaagcttccaccttccattcttccttcttctcccttaggctatatgctttttttttttttttttttttttttttgagacagagtctcactccttcgcccaggctggagtgcagtggcgtgatctcggctcactgcaagctccgcctcccaggttcatgccattctcctgcctcagcctcccgagtagctgggactacaggccccccccaccacgcccggctaattttttgtatttttagtagaaacggggtttcaccttcttaggcaggatggtcttgatttcatgacctggtgatccacccgcctcggcttcccaaagtgctgggattacaggcgtgagccaccatgcccggcctagcctatattcttaagaacttaaaacttcttcaactctcacctgacctaaaatctaagcatcttattttcttctgcaatgccgcttgaccccaatacaaactcgacagtagttccaaatagccagaaaatggcactttgaatttttccatcctgcaagatctaaataattcttgtagtaaaatgggcaaatggtgaggtgcctgacatccaggcattcttttacacatcagtcccttcctagtctctgtgcccagtgcaactcgtcccaaatcttccttctttccctccctcctgtcccctcagtcccaaccccaagcgtcgctgagtctttctaatcttcctttactacagacccatctgacctctcccctccttgccaggccaagctaggtcccaattcttcctcggcctccgctcctccaccctgtaatctttttatcacctcccctcctcacacctggtccagcttacagtttcgttgtgtgactagccctcccccacctgcccagcaatttactcttaaaaaggtggctggagccaaaggcatagtcaaggttaatgctgctttttctttatcccaaatcagaagcgtttaggctctttttcatcaaatataaaaacccagcccagttcatggctcgttcggcagcaaccctgagacgctttacagccctagaccctaaaaggtcaaaaggccatcttattctcaatatacattttattacccaatctgctcccgacattaaataaaactccaaaaattagaatctggccctcaaaccccacaagaggacttaattaacctcaccttcaaggtgtacaataataataaaaaaaaaaaagttgcaattccttgcctcctctgtgagacaaaccccagccacatctccagcacacaagaacttccaaacgcctgaaccgcaggagccaggcattcctccagaacctcctcccccaggagcttgctacacatgccggaaatctggccactgggccaaggaatgcccgcagcccgggattcctcctaagccgtgtcccatctgtgtgggaccccactgaaaattggactgttcaactcacctggcagccactcccagagcccctggaactctggcccaaggctctctgactgactccttcttggcttagcagctgaagactgatgctgcctgattgcctcggaagccccgtagaccatcacggacgccgagcttcaggtaactctcacagtggaaggtaagcctgtccccttcttaatcaatatggaggctacccactccacattaccttcttttcaagggcctgtttcccttgcctccataactgttgtgggtattgatagccaggcttctaaacctcttaaaactccccaactctggtgccaatttagacaatactcttttaagcactcctttttagttatccccacctgcccagttcccttattaggctgagacactttaactaaattatctgcttccctgactattcctggactacagctatatcttgttgccacccttcttcccaatccaaagcctcctttgcatcctcctcttgtatcccccaccttaacccacaagtataagatacctctactccctccttggcgacccttaccatctcattaaaacctaatcacctttaccccactcaacaccaatatcccatcccacagtgcgctttaaaaggattaaagcctgttatcactcgcctgctactacatggccttttaaagcttataaactctccttacaattcccccattttactgcccaaaaaccagacaagccttacaagttagtttgggatctgcgccttagcaaccaaattgttttgcctatccaccctgtggtgcccaacctgtacactcttttgtcctcaataccttcctccacaactcactattccgtgcttgatcttaaagatgcttttttcactactcccctgcaccccttgtcccagcctctttttgctttcacttagactgaccctgacacccattaggctcagcaaattacctaggccgtactgccgcaaggcttcatagacagcccccattacttcagtcaagcccaaatttcatcctcatctgttacctatcttgcataattctcataaaaacatacatgctttccctgctgatcatgtccgattaatctcccaaacctcaatcccttacaaaacaacaactcctttccttcctaggcatagttagcgctgtcagaattcttacacaacagccaggaccgcaccctgtagcctttctgtgcaaacaacttgaccttactgttttagcctggccctcatgtctgcgtgcagcggctgccgctgctttaatacttttagaggccctcaaaattacaaactatgctcaactcactctctacagttctcataacttccaaaatctattttcttcctcatatactttctgacgcatatattttctgctccccggctccttcagctgtactcactctttaagtcccacaattaccattgttcctggcctggacttcaatctggcctcccacattattcctgataccacacctgacccccatgactgtatctctctgatccacctgatattcaccccatttccccacatttccttcttccctgtttctcaccctgatcacacttgatttattgatggcagttccaccaggcctaatcaccatacaccagcaaaggcaggatatgctatagtacaagccactagccttcctcttagaaactttcatttcctttccatcatagaaatctatcctcaaggaaataacttctcagtgttccatctgctattctatctgctattctactactcctcaaggattattcaggccccctcccttccctacacatcaagctcgaggatttgccccagcccaggactgacaaattagctttactcaacatgccctgagtcacaaaaactaaaatacctcttagtctaagtagacactttcactagataggtagaggcctttcctacagggtctgagaaggccactgcagtcatttcttcccttctgtcagacataattcctcagtttagccttcccacctctatacagtctgataacagaccggcctttattagtcaaatcagccaagcattttttcaggctcttagtattcagtgacagacaaatggtctattagaaacacacctcaccaagctcagccaccaacttaaaaaggactggacaatacttttaccacttttgcttctcagaatttaggcctgtcctcagaatactataaggtacagcccatttgagctcctttttattaggccccagtctcattccagacaccagaccaacttggactgtgcccccaaaaaacttgtcatccctactatcttctgtctagtcatactcccattcaccgttctcaactactcatacatgccctgctcttgtttacactgccagtttacactgtttctccaagccatcacagccatctcctggtgctatccccaaactgccactcttaactcttgaagtaaataaataatctttgctggcaggactatgctgaatctccttaggcgctctctaatcagatgtcctaggtcctcccaattcttataccttttatacctgtttttctccttctcttattccatttagtttttcaattcatacaaaaccgtatccaggccatcaccaatcattctatacgacaaatgtttcttctaacatccccacaacatcaccccttaccacaagatcttccttcagcttaatctctcccactctaggttcccacaccacccctaatcccgcttgaagcagcccggagaaacatcgcccattctctctccataccacccccaaaaattttcgccgccccaacacttcaacactatttttatttttcttattaatataagaagggaggaatgtcaggcctctgagcccaagccaagccattgcatcccctgtgacttgcacgtatacgaccagatggcctgaagtaactcaagaatcacaaaagaagtgaaaaggccctgccctgccttaactgatgacattccaccattttgatttgttcccgccccaccttaactgagtgattaaccctgtgaatttccttctcctggctcagaagctcccccactgagcaccttgtgacccccgcccctgcctaccagagaacaactccctttgactgtaattttccattaccttcccaaatcctataaaacggccccacccctatctcccttcgctgactctcttttcggactcagcccacctgcacccaggtgaaataaacagccatgttgctcacacaaagcctgtttggtggtctcttcacacggacgcgcatgaaaatcagagcaggaggcagggatggggaggagctacacacatttaaacaaccagatctcaccacaactcacccactattatgagaacagaacgaagggaaaatttacccattgattcaatcaccacccaccaggcccaacctccaacactgaaaattacaatttgacatgagatttgggtggggacacagacccaaaccatatcacctgcagtgtcgagctgacctgaatttgaattccagttccaccactacctaactgtgaatatggccattttacagattatttcatctgtaaatggagggtaaaccatgttggtttgtgtaagaattaggaattgtgcttagcacagggcatagcagccattaggcggttctatattataattattactaatatttagccagttaattaacaaatattaggtgtttactccttgccagagtctggtgaaggccctaagaataaaataataaagaagaacagacacagctattttccttggaagctagtaggcatacagacagatattcatcaaataattattactcagataatcacacaaataatacacagtatatctataatatgtgatataaaatgtagagaccacaaaggtatgaatgtggatgacggggagtgtgttctaaactgggaggagggaggcaagtgtcacagatttcctgagaaggtgccatttaaactaatgcccaaaggataaatagacattgcataggcacggggaaagcaaatcaaaaagttttccaaataatggcaacagtttgtgcaaaagtcctatggcaaatggcaacatcaaggaacttaaaattatcagtgggtactgggctcagaaatcaaaagggagtagagcttcagatttggagaggaagaaaagtgacagaaatacaaaagtcatgcttttctctgttgttgtttttggtagcagtggtagtagtgtagtattccattccaaatttctgttcccactttaaggtattttatcatgattagtgtccagccacatataccatgaagacacactgagggccactaggctgccctggtcacaacctaagatcgtcctgtccatggctctgtgggaggctccgtttggatgtagagcaaaggagtggccccaatgtgagtggggtgtatagccatgaggacatacgcttttctcatttcgactctcttgtggttttgaatagcgtacttggtggttgaattaacaaagcactttgctactctctggctatggccatgttctggaaaactctcgatcaggtagcaaaatgaattcaacccttactgttttccatacaaagttctgaaggctttatgtattttgccactgattctcccagcattcacagtgactggttcaggctggcctgtgtttttcctagatcatctttattgccagtgtccgcagttgctggaagactttccaggatcctgcatgcatatggcttttgatggaaaaatgtctcccttggcatctccttgtaggagtcacatatatcaaaacccagctcccagaccacccttccagccaaacattcataaacgtccaggagggaaagaagttatgcaggaagactatatctcttaataaaatcttgagagagtttccatttcatttctaataaatcttctgtaagtgagtgttgtacaatactttcttaagaggcaaaattgcctccaaatcttttcctggatcaggactacagaatcatttgtacccgtctaacacatcataatctatctttggcttgacagtagtagacactattttttatttcatatagtatattattattcaagctcttttttaataagtaggttttcactgaatacaccttcttcttaataaaaaagtctaataaaatttagcataaatgtcattatttccccttttattaaaacttgttttaggagctctgctctatatttttgggctctaaaaaggggcagaaatttgagagagttggtatagcactgtgggttagaatgcaaactcaggattaaatagacctgggttccagtccaaacctttctgtgtaacctagagtgagtaactttacctctctgaacatgcttttgtttcctcatctatagaaaaggaataattagagacaattttaaggatttcaaaggaaactgaacctaaaagtttaatgcagtgcctgacacatcatctacactcattaaatttcattttattatttctttatcccatctaatctaataatagcctcaggtccttttatctaattatagtaatagctgccattttttgatcacatactatatgctgtgaattgccaagtgctttatgtgaattatctcattaaatattttcaataactctgtaaaataggtgttattatcattaccattttacagatgaggagattgagaggcaggcacattaagtcccttatgcaggattacatggctgtgagcagtagaattgtagtatcctctaatgcctgctctgagttgtggaaaatcagggctccagactacccaaaattcctttgttaaggatggagccgataggatctctttatgatgctctgtggtccttctcaaggacatgcagcacacctcagactttggaaggagggcttagccactagactggggctgtcctgggagggtcattttatgatccagtgaaatagtggaacgtgcctggaattctgactgcgtcagatctgcactcaaataggctgaagaggtgaatgaccttgttcaattattttaaatgttctgacagccagtttccttatttgtaaaatggagaaaggaatgctaactagctcacagagaccttctggggaagctgtactgcatcgtagtggttaggcacacaggttctagaatctgactgcctgaggtttatccacttcactatgtaactgaccatgagaaagttatttgatcttttagcctcagttccttcagctttattgtgactcttaccagcagtagagaactggtggcattgttataataacatcaacagaataaatatgactgaaatgagggtcaagaacatattttcactatttttcctatgtgaggaattcttcattatgccccagttgtatgttaccatttttaaggaatttgatataagtggagaaagtctatcattagttacactggtcctaaacaacaattattaagtgatccaaggctgccagcatcacacttggcaacatcagttacaatataggagtgccagggggcatagatgtacttgagctggcttttgatctcatgagtttctacacagccccccaagtgaaatgatttagaatcaaccggtaatactttcagagaaacaaaagccttgagtttattctctactcaatcagaagtctgcaaactctttctgtaaagaatctgatatgagttaggttcccattttagaaatgcttggtattggaagtgttttagatttcagattttttttcagattttggaacgtttgcattatccttactcattcagcatccctaatccaaaattctccaatgagcgtttcatttgagtgtcatgttggtgctcaagaagtttgatttcagagcattttggattttggattttcaaattagggatactcaacctgtagtcctatatttcaggcttcatggaataagagttaatgtcttcaactctttcaacaactgttctcactgaaggacaaacggtctttcttacattttacattagaaatgtaaaaagcattcttagctaatatagcctaacggaaacaggaagcaggctggatttggtccggcggttatggtttgtcagctcctgtcccagagtatggtggttaagagcgtggattctggagctgcaccatgtgagtctgtattcttgatttgtcactttgtagctggatgacctaggggaagttgtttaaactttccatcttcatttcctcatgtaaagcatgtaaagatgtcatgggagtgctgggggttaaatgagtaaacacatgtcaagcattcaaaatggagttttccatgcaataagtgctaagtgtttgtctttattattattatgttccaatttttcctgtttctcccagttttggaaaatacctgtagcatcagcccttttttacatcatagtgttctatttctctatagtccttccaacagattttctctataagtgctttcatgagtctcttgcatccaaatcatctagcgaacttgttaaaatgcaaattcctggactcctcccaagatttgctgtatcctgacttctagaggtgggccctgagaatgagcatttaatatactttactggtggttgctctgcacatgaattttagggtccactgcccctagagttccacatatcctccttcttataaagattcccggctggaagatagatgaaaaggaggggtacgaatcactgagttaaccctaagtctgatctaccagcaaccctgcctgagtgtcaaagcccagcagttaaaatacatgcttctaaatttcctccagtaccaggaggggaaggaagaagtactgattattgggaaaccaagcaccacccctatccagactgtgtggttggacacaggggagctaaatgaactcagttaaaccttgtggatttggaaatgagcacggaaagactgatcttatagtggcccaggcccccttccagagcagtagggcttgtgatacacaagaacacctctggacttcctctgaacttcactatgaaaagcgagaaccacagtatgcagctgctgggtacaaaactttcagggttttgcatttcctaagtgcaactattgtcatttgcttttcgatttatgcaatacttaatatttggggacatgttttttaaggtaaaaacttcaatgagtaccaattttgaaaggtaaaattttaaagtacttttctatcctcagtccctctcaccaaaagtaaccataattattattttcttctctgtccttctggaaatgtctcaagcatatgcaaaaaaacttatgggatgtagttgctagaaatacatattttttgcactaatatgatcatacaatatttattctaaggcgactagttcctttgacttaaactgtgtcctggaccaaatgatcacttttgattccaagtacctacttctatcacatttatcctttccgaatgcccacctccttcttccttccattctgtaatgtcattctttatgttacctagaaatttataatggatgttttattatcatcatcaaaataaggatgaacgcctgtagatagaagtattattcttaacagaccacagatgcatagacaaagctctccccccacttataaatgagtctgatgtttccttgggatctgtcagggaaacattattttccccttggtctagggacagcttctagcatagctgatgtagctaccaaacaaagaagggacactgtggcttcctaaagatatccatccccgggcaccatgctacctggggatctcctagctcacaattggaagttcctattgaagtttgaaaagctgttaggcaggatagccaagcattggtttgctcacaaaatctactctggcctagatgccactgttcatgttgggagtatcaggggaaacatctccagtgggcagtagtaggacttacagagtgctgaaaacaggtaagtggtgtctaggtgtgtaaggaaagagaagaggtagactgtttaccatagtccagtagcctgccacagtttgtcaaaagaatttgagaggctgagcgtggtggcttatgcctgtaatcccagcactttgggaggccgaggtgggcagatcacctgaggtcaggaattcgagaccagcctggccaacatggcaaagccttatctctactaaaagtacaaaaattagccaggtgtggtggcatgcgcctgtaatcccagctactcaggagactgaggcaggagaatcgcttgaaccagggagggggaggttgcagtgagctgagattgtgccactggactccagcctgggcgacaagagtgagactccacctcaaaaaaaaaaaaaaaattgacagtaggcaagtgaaatgaagcctcatgaacacttaataaaaagggaaccagcatgaggtcatcgagatgacgccatccctcagtaccctcaataaccacatttcctttcttggtgcagttgccagactagaaaaccaggatagtaccataaacatagaggatcagaaattcagaaacaggttttacaaaagtctcttacgagtgcaggatggtattttatttggttgagctcactcttagaggatgccagcaaatatgtgaatgtctgactggccatggatcactggcagtgcacctaaagattcactttgatacttgcagaaccttatagatggcataccttcagggacaggatggctgagaattctagttctggagaaatgcaaaagtcccaagtagcctgggacaatgggctactcattacgagacctgtgcattggagctgatatggacgagcaaaaacaagcaaggttcattatcaattaggggaagacatgaaaggtggtgagagacctaggaaaaaagaaagaagtgattccttttgtgctgggcaggtagtgtggcagagaccatttccatcagagtctttgatctcctagggatatcagtttgtgatgagcttcatggggaagaaaggaaaaactctaatactgtagaagtaacccttcagtgttttttaggaatagagtctgcccaagagcaaggagcaaataatgagagtcctcatgaattttcaaagtcctttttaaagagtagttcagacaacaggaccctgaaggccaagtgagaccttggtagcctctggactcttgacgtttttcctctcttgaaataatcatccctgagtgaataagaatcggtgacagaggcattcattcaacccaccgttgccaaatatctgtctaccctgcacctagcctgtaactagtgctgggcaaatagaaatgcgtaagaaacaccgctcctcaggccgggcacggtatctcatgcctgtaatcccggcactttggcaggccgaggcgggcaggtcacaaggtcaaaagatcgagaccattctggttaacatggtgaaacagcatctctactaaaaatacaaaaaattagctgggcatggtggcacgtgcctgtagtcccagctactcgggaggctgaagcaagagaatcacttgaacctggaggcagatgttgcagtgagttgagatcgcgccaccgctctccagcctgggcaacagagtgagactgcgtctcaaaaaaaaaaaaaaaaaaaaaaaaaagtaaaaagaaaaaagaaacgccgcttctctttaaggatctcacagccaagacaatgtttcccaagcaatggtgcccagattacctaatcagaatcacctagatgctgtgtcaaaaatgaagatttctggaacacagcctgtatttgctaaatctacatgttaacgattccctcagttatggatgtgaacagaaaactgctctgaaggaggcagataggaatctatctctgagtatgagagtgagtacatgtatggggtgatgggtgaaggcatgcgtgtatatattgtaaggtggtgaggacatgctaagagtatacgcatgagcatgtatgaatgcctgtgctgagggaaagtgcatgctgcattaagaagctatacaaagtgttcagttacttaatcagaagagaacaaaggcccatagaccaagtttctgaaactttaaaaggctcataccccatccagagtaagcttaaggatcagaggtgagaaactaccatcctcatagtttagtctgcagtccatgggatacagaaaaagcaaacatttttgagactgtctatgtctaatagcaacagcagtttttgaagtcacacagatctggacttgcatccggactgtgtcacttaccacttgtgtgatcttgatcaagaagctcatacactgaaccctaatgcccctgtctgaagaataggggtggcagtgccaatccttcagggtattgtgatcctaacattgctatgtgtgatgcagccccaacaaccagacacataagatgtgggggagtggaaagtggtgtggctggaggtgtgaaatccaggaggtgagaggattaccctctaataaatacaactcttggggtcctgggaacaacctcatgaatttacagtgaagacagatacatctttcctctttcctctgatttttccttgatccttacaagaggtgctgaacttcctgttagcagacatgatcaagcagaaactgaaccatggagatgtgtcccccatccactagcaggactttgactttgggtgcctgtcttctctagcaccagaatcctgggattctgagtccctgggtttctccagcttcccagtgtcttatgtataggctgagtcgtgattacatgtttggctcccacggagagatcttgctcccacccgcttgcaccactaagactagctttttggagtcgatcagaggttgccaggagaaggtcatacattcaagaatagcgtttcacccagcttccctccccagtgaatgtgccacaccaggttggaagagacatggtctcactgcaggatctttcccaaatgcaccccagaacacgatggggcagcactcagctcaagttaccatgttccaacgacttcctacctaccaggctgccatatgttcaggatggttctattgccagatgtatgtcaaagttttcctttttaaaatgtaatttccaccagaatacactggcatcctacaatgctgcttcttggctgcagaagcagtttttctgccatttgggcctaaaatagaaaccacacgcaaccttgacagtaatcacgaccaaggagagagaacgcacatctatttatgtggcactgaaggtgagttcttcctttgtgctactgcactggggaccagatcaacagagctaggaatatcagctcaaactgatacaatcacaaatatacaagatataataaactactggatattacaggtaaagtttatttttgagttttaaagaatttgagatattcataaattagggttttgtgtaggggtgacatagtgtattcattctcttattctttattcctcactgttcatgtctagtggacggtgaggtctcggcatctcatgacttgatggatatgacagtatccaggcatgtgttcatgtgaatgaatgtgctgtgtaaatagtggaagaactctcaagaattttattcagcaaaatcatatttattccaaaatatgtttttggcatccagaaaccacttctgagaatggaaatcacattcatgttttaaaattgtactcactttcggctgggtgcactggctcacacctgtaatcccagcacttgggaggccgacgcgggtggatcacttgaggtcaggagtttgactcccggccaatatggtgaaatctgggccaacatggtgaaaccctgtctctactaaaaatacccaaattagccagacatggtggtgtgtgtctgtaatcccagctatttgggaggctgagatgggacaactgcttgaacccaggaggcagaggtggcagtgagccaagatcacaccactgcaccccagtctgggcaaccgagcgagactctgtcaaaaaaaaaaaaaatactcactttcatttgaagtgaataatcagcatttttgttttccttttcaaatcccagtagttaggatggtagccttgatggacttaataggtaacagtcaacacatccctgagaacaaggtgtccatctgttccagaatacaaatatccaccttcacctcactgcttctcaaacctggtctcttcaaggtggtcctttctttcttttctgctaccagggcaaggctgttgcatttcagggttgtttctttattacctggcttatttgttcaaatggggttggatggaaaaacatgctgcttgcttaaatctgcaagaaaaaaatactacagggctctctggggtagccactggaaaattcaccactctgagacttttattgatgacaaactcgagtatgtttaagaaagcacacacacctagcaacgatttggacatgaagataatgtcagccccatgcacgggtacactgtccctgccgagaatttcactggagactcatttgggggctctagggcagggtctggctgccagctggtgttgagatggagttttccccccagagtaatcaattatcatttcccaagacgagctcatggaatgctgccagcacagtgggttgaatagtctgggagctggaattctttcccagatgtaggggtcatcccatgtatgtgtggtaacgatgaaccagaaaggcacagagaaaacatagtgactattgaaagtaggtctcaagttaaaaaaaatgttataaaacaggtgacagcaatactacacataaatatttgtcagctgggtgatgcagaagtaatcagacagatttctagggaccagtagaagaaatggatcttaagtataatctgttctaattccacaattaatagacaacagctttgatggagaaacttttctgtgcaaaacaatatccaacagcagacagatatagcagtagtaatccaaactctttcctcacggagcttgaaggacttgatgaacattctaaggaaatacagcatattaacatataataataaaatgaggcaagatatgagtgcttacaatgggtcaggtacactgttagactttagacacacaatttcccttaagtatttcaaaaaagtacaaggtatacactattttaattcccactctatagataaataaaccaagtttcagagcagtgctggaactagatgaaacaagtaagacacttgacttgggtgcaaaattaaaggagacaccaaaacctcagtaatcaagatttttaaatatcagaatgaaaaagtattacaataaaatatcaaaattttaaatgaagacacaatcagtattgctgattttttttttccttttgtctcaggctccagtctagcttggtgaggtgctggttcagagcattgatgagaagacttcccaaagctcatccatcagtgtgtggtacactaatgcctaagagatttgattttatggcttgaactttcaatctgtgcactccaaccgaggaggacaagggtcaagccttgctgatgcaggttctgggaaggaggtgtcaggggaagcctctcttacccagatttgcaagtggattgaaaaaagagcagatgtgcaaagtcaggagaatagtggtggtgggccaagtcccataccctggtgagaaggatccagctgggcttgggagaagctgattgtgaaatactgacagcgaaaggctatcgtggggagcaagagaacagcagctgagtaggccagtgggagtcaggactggatacattcctgacttagaaaagggctttgataaactccaagaaaaatgatgtgcagatgagcacgccactctacaaaatggcccaaagatggagtagagaggcatctcaagccacagagccttggctcaaaatcactccagattggcagtctgtaaaaccaggatttggaacttaagaacacaccatactttcctgtctccagggaaaggatgattgccttatgcacttacataattctgctcacaccccttcccccacaaatatttggcccctggaatgggacagggcgagttgatagctccctggggacagggtggactctggcttatagacacagaaagatttatttctgctgaacctgtgacagcttggtaagagtatttcaataatttgagctgcttacctactgttccttttgtttttaacaggttcagtcattcactttgctcaatggattgggcttgtctttagaaaggggaatgttgtagctcagaagccagtgatgggctcagtaaggggcagcaggtagggagtgagggtaaaagatagaattccgatagaggaaatatggaatttcacttacaaactaatggaatgcaaacgttgttggaattccataccagagagcaccccagtgaatccttcccaaatgtcctgaccttacgcctgttgtggtaatagtcaggttaatgtaagagatgtttccccagatacccaggtaatctagaaaacatattctaatttcaagggggattcacctcacaggcctggagatatgagcctctagttttcttcttttcgcactagtctattgacctccacaaaataagtaactccaatgagaattattccctttcgtattatcagacttcagagccctcaatcccatatgaagcactggaggcctgtctctttccagctccacctcccacatgcaaaagcttaggcaaggggccagctaacctgcttggctattggcaccttgaaatggaagtaaatccctactcttctgatttattatttcctgttcttcgaagaggggggaaggcagcaagtcttgaagtatttaagcagttagtcactgtacaaatccatctcctgtctcacccccaattcaggggaataatatttttttccctgagttacataaggcatgatagaaagcatttcggaaccccgtctgcctcaggaccgatttcttgaggtaaatctctaggaaatctttcacagtttctaaaataagtgcccaggctttgaaaataggtcctacagcatgagcaagctctatgtcacccatgtgttaaccttagcatcacttcctctctttctatcatcactgtcttcagttccaatgcagtttcatccagatgacaggtgcagccgtgtgcatttttacaaatggagctatgtttcaatcctggagatttttgatattaagttccgtaagtcaaaactcaaaacaacatgggaaaaaagttaaatttaatgtaaactggacaattttacgattagctaaagtactgagctcattacaaactggaaattccctaacagacattgtcttcgctggacaaggtagctaataatgacattaatttcttggggttttgtctgtatttgtgtttgtgtgtgagtgtattttatcactaaatggctaagagttgcacatctgtaacttagtcctgcctatggttgtataatggagggagattttttttgtaagactaaggtgttatttcttcttgctataaatggctgatagatcttggcttttctcagatgttctaggtcaggaaccatagtccatcagcctgcaatagaagagacacctgaaactagacttgaatatcctcctctcggctccttcccttctctcaaaccatttggtactcacatctgactttaagtaaatgtatttcccattagctcatctcagcttagctttggtctctgaatctcaggacccaaagctatgatttccagctagtggctcatagctttaacttattttctaccctcaaccacttaatatgacctatttaaattgccatcttcgctgtctgcatgtggccttttcttagatctgcttcttgcttctgggaacaccaattcctatcacaaaagattcattcacccccaatctatgaccactcagttgataagtacccacatgtattaaataacatgagaaagtcttagagtggaccctactatatacatgcacacacacacacagactgatacttcatcatgaatggaacacatctggccagagattgactgagacatatttgcctttgtaaatctggacatgcagttcccaggtttgtgaatcaacatattttaatatccttctaataatactgatctaataagtatcctaacactcaattctaggcatgtggtctgggaccaatcaaattccaaaattattgagctcctattattttcatttgaacttcattcaagttcaagtcatctagaacctctctgtcttctgccctgaccttgaaataagtctcccaagagatggtggtcacctactacctggcctttaaccatgatagacggacagcttgggattccagatacttctgattattcatctgctagtggccttggctgcattgctggatggcccagacgctgtgtattaatttgactttctactgctattcttggaatttttatcagtgtggccctagccctgttgagaacctcattatcaagaagtggcttctcctgggcagctgaagggatatttattaatacatgttttgagccctgtaaggaagggagaaaaacaaagaagactatattggctattattttctaaccctcccttcctcctcttcctttcttatttcctttcccaattctctccttttattcaataaacatagcatgttaactacataatttgtaggaacttgcaaatatgattagaaagaattccacctccacataacttttgtttgctacacacacccaaatgaacacacacacacccacacacacacttagaatgagaaaagttgttaaaggatatataacattaaacatcaaaacgaatgatacaaacagaaaaagtggtgctaatagttgaaagaaagaaaagcaaaatagcatctaaatcgattaagagaaaaagttaacaaacctgcacattgtgcacattgtactctagaacttaaagtataataataaaaaatatatatataaaagttaataatataagtaatcatatccattagttattgagcatttctatatcttcataaggcaaagtgtctgtctagagcaatcactgcttaggtactttcagcttactaaatgatggctccctccatacccaatgatgtgtgtgcgtgtgtgtgtgtgtgtgtgtgtgtgtgtttgtatgcatgcacaaatgcctgttgggatttcctttaggatctctctaaaactcacatctctatgagataggaataattcttaatttaccaatgagaaaaccaaagcttacagaggttaaatgacttatataactagtcagtggcagaactgaatctgtctactctgaggctaatgtttcttaacacaagatttccacaagaaggtgaggtttaagtatgacctaaaaggatgtgcatgactttatagcagaagttagtggcagggtagaaggcagaaaaaccataggttggaatgtgaaattgagacaaagcatgtacagcagggtcaatgagaagccagagagaggggaaagaaggtaaaaggaaacaatgatcagtgagacatagagagtaagccagaagccatatgtggaaattcatgaatactggaaagaagactgtgagcttgaatcacaggcaataagagtcccagacagtgtatggtggacaagtaatcgaatggcctcagttttaagaaaattaattcacccagaaaatccagatgcattgtgatggagacagcacacacacacacatgaaaaatttagcaattgaagaataacatttattccaatgtgatccaatctccaccactccaaacatttagaaacaaagcacatgaccttaataacctgccgtgaaaaatcctgcctcacatgcatttgtaggaaaacctctttttctttcttcagtcatttgtcatcaaatcagtttcttacctccaattttaattactaatatatgtaatgccactcaaaagaaaaagagagacagacagatttatcaaagcaaaacagcagctcccttctgatctcacatcatttctaaggaatcaggagtcaatatggggtaagggaccctgtactaacagagtaaaacatgttcaaaacttcaccaacaacctctgagagaagatggagtttggtcaggagctgctaatggttgagatggcttagcatgtattacttgatggagagagtactggagagctttcaattaagctgctgcaaagctccctttctgctcaggctctttgacaggtcattgaatggggttttcaaggacaaagaatgagcgggcatgtccccatggaagccagtgcccctctcagaagtgttaattccagtgatttctcctggaaaaggaaatggagaagtcagggatggataagcctgctgactaatctataaaaccaatgccccaggactggcagaagttgaaatcatttacttataattagaggtgcaacagactgtgggacttgaaattttacgattcaacattcttggtgaaaatgctcaataataattaagaaaacaatcaaaatcttgggcaagaaatatgtgaattaatatcagatatcctcttctcaagcaagaccagcataggtcttctgataagtcaccactttgaaaactgaagttaaacataatcaaaatcttcccttcagcaccccaccatcactagggctgggattatgtaggacaaggggattttaggctatgaggggacatagaaaagaaggtcagatttctcaagacttcctgtcagggttgacctttaatgaatatgccccctgggattctagagtctggaaaagaatgtaatgactttatttacaacaataagaattagagaccaacaagtcaatgccattaggaagcatttttggatttttggtccaaaattttaattgaaaacaagaaagtatgcttataataagatgggaaaaattacaatacggatctcattatttcaactatagatgcaggtgaacaagactagtatggaatttgcaaagaaaaaggaaaataattaatttaggtttaagacgttacaaggaaatgttttgtccctggatcagtgtcattaagtattgctgttttactgactttacattttttaaagtggatcaaaaaccatcagttgtataaaattgaattattatcagtagaatggttttgagagagctgggtgtgatctttagctagttcccataacaaaaatatgttgcatagagtaaattaacatgtgcagaggaattagtatagtgtctggcacatagtggcccatcttgtaattttcattgccattattactaggtaataatgttctaatgttattagaacatgcacgttgtgatttgcccaactttgctactgctacatatgttaaaaatatatgaaggcatttgctgattgctgtgatgtctgctattctagagaggtccatcagagtccttccacctctaaagcaaggggacatttgcatccctcatttgatgtctcctgcaggggattttcctatgtcagaaaagtcctcagtgaaaggtccaaattcaccagtaaatatcttcccagcatttcaaaatatttcactctaaaggtcagatattaaacaaaattaaatattttgctctcttctaccctctctagaggccactgaagactgctggcaaccaggagtcagagcacattatctgttattagcacagagttagctgttgcttggggctgcgggagaggaggctgaagtctattcaattatgtgtaaagaagcgcaatcctggatatttccaagccctcccatcatttggacacatggtatttgggatgctgtaaatgtaaatgtaattctggtatcctatgaagaatctgggatgtaggcttcaaaatagatgtatcatcaatcttccattaattcaacataactatgttgatcattactgtattttactgaccttaagacacaattgttgtgtgtggttgtttcacatttaaacacctctaaatgtagatgtgcaaggaattcaggcagcaaatggatatgctttttattgcctgtgcataaccatcaaaattttcagagtgagcatcaggggcttgaaggaaaatcccagggaaaaaagttgagccctcttgcaaaaaaacgattcttcaccaatacacttgaaaggctatataggacaatattgtttggggacaaaacccggacaatggaaactctgagtcaaagaataatacaacaagattcagtttgaagtgttaaaattttaagacaccttaaccaatttactgtgtgttattatttgcctttttatatgtgtacaagtatgttacatggcaaaacctacatctaaataagactaaaagggcacttttaataaataaaaataatttagtaaataaaagttttagtttaaaaacaagaaaaactggttttagaatatagtttaacctattattctcctaaagaatatagtgtcttctcaggcttaaggataacacaagtcaatggtatgaaaaagacaatgtatatattacacttggctaattatctagtagacataaaactaatcaataaagtggtcttcctataaatacttctacacctgaacaaggatgactatgattcgaaggtccaatgagtcttctacctattttgaaagcagcaaccttctctcaaatgaattttggtgcaacacaatttgaaaatgccactaacaaaaattcactcaaaatacactcactcagaaaaaaaggtgtgaagggagtgcataagaaaaataccacatttattgaacatgtgctagatattgtactaggctttttgtgtgcattaactcattccatcctgacaagatatctatgaagcagatatcaatatccctaaattacagttttaaaaaatgaccagaagatttttctactcgcttcaagtcacacaactggtggagtacaaatatgagatttggataccaaacactatgtaccttaatatatattcttgatacagagtattgaattatcccttaatcaatctatgccaagaatcatcccatacacaaacacacaaactaaattgccagcctcataagctaagagcaagtaataaaatgtttatataagtcaaaagaaatattgagccaagtaatcagttatttcatcagagaatgcattaaaacctaaaatgattgatgatgatgtaaaagaaagtgatcagtggacctcgggatcttgacattgtgtgatacatgagccaaacttgttatggaaagtcctgaaattgtttaacctggtgtgagtgaggggtgggaggtcatgcttttcccattggtgacaaatttttccatttaacagagaaaaaaagacttccgtatatgttatattccattccccaaaatgagctcaagattcttggggaggaaaacacatttatagtgctgacttaacctcagtgagaatgcattattattataaggttcagcacttgacataggctttgtacagaatggctcacattttaaataccaggcacaattactgcatcatgagaagctgatctaaaccacaaattggggcataataggcaggagaaaaaggttgaacagacaaatcattcaataggtgattctgtttaaaaagaaatatttttaaaatgcccatctttgatggccaccaatgaggaaacattaaactagcaaaaagaaaatgactaatacacaaccaagagaagtgtatagtgaagctacatgtacatactttgtatagaagagaataaatcatactcttcataaatatttgcattagggtcgaaacctaaactttatagtcctaggctatccccaagtcaatatactacctctccagaatattgaagaatcttcatttaccaaagaacatagccagtaatttactgtgtattaatttacaatagaaataataaacttagtataataaactcagtcttagttcagatttgcatgaactgaaagagaaggtcaaatctatgggagagaaaagtcaagaaggatataggaagatatacataattgcagttagctggggaacaattcaataggcataggggaaagatttatgacaccaggatatcatcctatggtttcaggcctcaacaaacacatgcagattccctgggaaagagttagaaagaaccagagagagaagcaggaggaggttaagcaggtctggccccagaatctcagagggaaagtggaatgctgaccagaaaacatgtttggaagcccaattgcaaggtttaggtcaaaataagaggtgtcatagaaagggttagagatgagcccacatattggcacctgggacagaggcagcaagactctctctgaatccttatgtgcccttagcacaaaaaagagcacctcgttggtctgtagttgtagtaggggtctcagctgctccacatgagaaacctgttgttgggctgttctgaattcaattaccccagacatggccccttttatttctgtacctaccagaatttcaccttctgaattttttatcctctgtttatctctgttgtgttgaaggaagaccacacaattcaagaacacagtgggggattacctacaccgtgcgctttcaaggagaaaacagaattttttaccttaaagttcctaccaatgaatatactagcatctgggatttcctacctctttgggtattgttactttccaatgatctttttatcttttatctatctattgttcttcctacttttcttcctatcatatctatcttaactgaataatgtctaagaaagatgacctctttagccaacatatatgatgtttagcttccacggaaataatttatcacatgaggagaaatggaagacatgacaatggcatttttaaaatagaagaggaggcagtgtgaaggcatgagaattcagaatgaagggggggaagagaaagaaagagagagagagagagattgagagagagactgatatagtatttgggttattcagaggagttgcaggaatcgtgaaaaaatagtgctgtgcctgtccttttgggcatgactaccatttatcaagtgactattacattatgctgcaggcaccatgccaactgctgtatatgtagcatctcatggacaactctctcatgtatgtgtgcttttatcccttttaaagatgagcgattgaggatccaagagcttaacacaagttacgcagcgagaagtagaggtaaggttctaatcaagttctatagttctgttctctctgctccaaaaccctttctccttccgctattttggtctctctccaaaacatccccaaaggctcattctgcctcatgaaatcacagatgataactctacaaggaacttaaatgattcctgcagcccaatactcccattttacagacgggtcagggaagtaatgtgagatgctcactaaggccctcagcttgtcaaggaactaggtctactcacttcacttccacttaacattcttctaggtgcttactggatctcagaggaagagtcaagaccataacccagggacacttgcaatgcctacccaggtttttcatgtcacccttctactactgcatgcacagatgcagctgtcaactttaggaacactgctttcaaaccttttcgaagttatttttttaccatcttctttaatactatactcctttagagagaaatatcactttctaatactttttaaatttttctatttttatgaagtgttagataaatgttgaatgtatgcaaaacaaacacacagcaacaagaatagccaaagaaaccatttggcttgcttcttctgctgtcgtcttcttgcctttaagcttgtgttctccctaacttttaaactcaaaagaattttttgtcaacattaaaagttttctgataagtattctgaatatgtttactgaggaaaaatttaaataaaaatcattgttcagatgtcactcatatcaatcactctctgcaacagctgtacagtagaaataattgcaaactcatgccctgtactttaaggatgtgagaagaaaagaaaaacaaaatggattatttttaacaagactctgcaagtgtccagcatctccaaagactatcttctgcccatctatttttccagaaatattaatgactattcctccaacgttttccattacgtaacacccacatccctcataatcatcccctccttttattaccattagcattacccacacagttccacactcaactcatttttaccacctctattgttacaccagacacccaacctggcagaaggatcagaaggaaagttgacaagatagtaaaatcaacaaagtgcagacctgaatcacatcaatgccagtgagtaatgtggggctgacttgctgtgaccctgtgaaatttacaagtgtctatatgggtaggtgttcccagtaacatctacccacacagactttgcccatataaatgtgaggtctgctagaaaaaaaaattaacaaagggtaagaataaaataactaagtgagagatggatttcatgggactccgactgtaagtttttgtcccagattgagaaagctgacatttaaccatctagaagaatgcactcaaaatctttgttaacttttggaccttgtcacctacttagaactgtagaacttaaggctgcaaaaactatcttctcttaccactaagccgttttcttagtaagccttttaccaatgtaggaaagaaaagctaacatcttttctctatcatctccatctcctccatgcacccaggagcctcaggagcaccaggctcaaaacccttgtccttgttcaactacactctttccctgctagtggagaagcgctctgtgatacttcactaggaatttggaagagttaatattaaactttgcattgggggccatttttatattttattacactggctgtaaggtgatttcaataatctaagtctattgcttctctaacaggaacaagtaccagctagagatttttcacatacgtgtctaaatatagttttacaatacctcattttaagaatgtagaaattgctcagagagcttactaaggcttgtataaagttttttatcatccactttttgatgtttactgtagacacaaaattgtcccactcatacctctttaaggaaaggcttgctgtccagctgcagaaaatacagtcagtggaggtggacggcgtccagctgtctgcttcttcagagcctgcctcacctgaagcaaggcaccttgcctaaggtccctctttttgccaaggcagatacatgcagtaactgagcaaggttggaaaataaagttttgaccatttggatccacagtgttacactctcagggctggtactcactccagagctctctgctggattggcttggctttgtcaattctctctagtagtttgacttctccctctgtttatccttctcaacctcttttctttcataagtgttgatttctaataaacattttgtatcccaccctttatcttgatgtctgcttctggatgcaaactgctgataccaacacaaccattttactctttttctttactcagataaagcctagaatctataacgcagtgtggccctagcaaggaacatacaaacagtacacaggtgaattattattgcatccagcttcagctggtactactcaaaccccagtgtcccagatctctggacacaggcttctaccctagagagtacatgtctgctttcactcccaggtttttctctcaggttttcagtgactctgagctactgaattcccagcttctaaactcttgattttctcataaatgagtccccaatatctactcaatatgatatttataatgctcattacctgtttttcaggggtccccaaataaaatgtctgctggggattgtccaataaaataaattattaaagttgtttaggtataagacaagagaccccaacctgcttgtttcgcaattgagcattacacctcactacctctccatatgccgtggtgtgagggatactgccttgagtgatctaacccttgcccacctctcatatattccccctcccctcattcaatcttctgcagccacagtgatcttcctgtttctcaaataagtcaagcacattccagtttctatgcctgtgtgtttgctgttctttcttcctgcaatgtacttaaccctcctatttctcatccatcagatattatcttaaatatcaccccttctgggagcattatccaaccaccctatgtaaaataggccacatacctccatacgctgctattttttatgacaggtctattactttatttcatcagacttcttctaattcacgattaatgaatgtgtttgtttacttaatttctgtctcctccactagactataagttccagaagggcagacaacatttttcttatgcaacatatatttctagggcctagcacagtgtcttgtccataatttttgaatcagtgaatttattcctgctcaaactcccttctccaggctccccatcaaacttcatggtggcaccgccatgtccaatccactctcccagggaatgcaattccatcgtcttcaaattgttgtattctggcccagcacagtggctcacacctgtaatcccagcactttgggaggccaaggtgggtggatcaccagaggtcaggagcttgagaccagcctggcaaacatggcaaaatcccgcctctactaaaaatataaaaattagctggtgtgatggcttgtgcctgtagtttcagctacttgggaggctgaggcaggagaatcacttgaacctgagaggtgcaggttgcagtgagctgagattgtgccagtgcactccagcatgggctacggagtgagactccatcaaaataaaataaaataaaataaagttatgtttagccgctttctctccatcttttatgctaccaccttaattcagacactcgtcattccacacttacacaactaccacactctcctcatgggtctccctggttctcctttcttcctctctatcctctgtaccctgtcaaagtgacctttccaatatgcaaatcactcctagtcttaaaacctttcaatggctccctgttgcctacagaataaagttcaaacttcttagcatgacatgtgagatactctgagatcttaccttgtcttcccctctggcttgatttctccatcttctccagcggcccccactgcacaacctctgaacattttcccctgcctctaatcatcctgtccattctaccttctaaatacctcccttcaatttattcactgacctgcatctctacagctaccaatctcattcacccctggcctgagcaacccacacatccttctctctaactgcacactgctgtgtccagtccattttctaaacatcagcaagtgagcttttaatcatagaaatgcttgcctcctctcctcctggcctaaaatccctccatggaaacaagttgaggtttctgcaagatctggcctgtaggtatttctttaccctctcccagcaccactccctgcactcagacccactgtcaagcactttcttatcccagagtttgtgttcctacttacctggggacactttctccctatggcttactatccctttcatttcatagctcaatattctttcctaggcaaggccaagattccctgagtgacgtctcatagctcattggatttttcttcaaggcctttatccacccatataagtgtgggatatgggtgaaagaacaagtttgcagaaaagatacagtgaattatggaccatgagttcgggaaagaagggtaggactgcgtcgctggctgcagtattctggaggctggtctttgggctgtgatcactcttcattctaaaggaggtactgctgagatgttaaaaccattgttttactttttcataattttcagggctttggtgtatcagaaggaggctgtagcatatgatcaactcaaagtctggaaataatttcaatcatgggatttttgtttattattatgttttaatttttgatataagcttcatctttttttaatctgttaaacaaaggaatttctcatcaactcccctaaccttcctaaactacatatgcaattattcattcatccattcatttgctcagaaaacactcattagatgccacatcctttcctagttgttggaaaggagtcacaggcatgaagtagagtgaggtcttaagaccctttgactgtggagtgtggaagaaaaaactacaattgcatcctgggttttagaaagatcgtgaagcaaaagaaggtcagaattttccagtccagagtaacagataaccagtaagaatcacatctgaagtggaaggttgggcagggaccaaatatccaggtcccaggggtagaatcattcagctggagagagcctcttggagctatttcagccatgccaatgattttaaaaagtgtctcctttagggcttggcaggttcctataaagaaaagcatgagatcaaggtccactagatagtggcatttgcttccaggtgagtatcatattcccagcctgattaaagtcaatagccaagaatattgagactaggccactgctgaaggaaaatatgggaaaggattaggtaaggtgttaggacccctgcaaaggtctagctatgacaaaggactagcctactagacagcaacatggggcagattcccagacctgtggacttaaccagcaggacctttgtctaccagcaatgcctaagacttaccccaaactggactgattatcatccatcaattccaagttccaaatagcaaactgagactgtgaatgagacacttagctttgagccgaatgggctccagccgaggcaaactgaggctgcaatggaatggcagggaaaatggagttggcactgtctatgtcctactgtcccctggctttcttgtcttcctgcataacccctggggggaaccatcatccctgtgaatcacggggctgctgcctccatttgttaaggccttcgttctgtcctttttaaatatcactgttaataccccctcgtgacactgtcttggtcctttacccttttatccagatattattaaaaactattgtcaaaaatggaattctctaaagatctcataaaagtcagctgtgaggccctgttacagaggagcgcggccttgtgactaggagccacttcccgagtcgtgatttctgcatcccacagttttgctttttcaaccccatgatagaaaagcctagagcttactcccctcacaccctcacactgcatccttcctgggcttgaaaccattcttaaaagaactgcactatttttttttttaacattctatatgcttcacacttactcgtttcatatttttatacataaaatcctcccactctctctccatcacaacctcactacctccctccacaaaatactttttttttttttaacagacattttcagaacatcagggatatatcctgccctgggatgctgatgaatggccgctttaagactcactgagacactttggtgcacggctcagagtgctctgaaggagtagttttaattcagcagttttgatgtggaagcaaaaatatataaaatggcattatattgctgggtaatgtgttgtagcactatgaatttaatccacagcagccaggcacacaaaagcttacatttattattttttctttctttaatctttttttttaaaaaaagaaaacaacttttattttagatttaggggtacatgtgcagctttgttatacaagtaactcatgttacaggggtttgacgaacagattattttatcaccgaggtactaagcctagtacccaatagttctttttttctgctcctcttcctcctcccaccctacaaattaaatctgattctaacgtggttaagagaaacagtttctattatattcagtgatcctttcatctccccaaagtcacgaagtaagaataataataattattttagctatttcattatagtcagttaaacatggttaacacatagcacactgtggttcagacaccatctaagtgtttcatctttacaaactcacttttcacctcaaccaccctaggagttaccattatttttacccattttatagatgaagatgttgaggcacaaagatcttcagtccaagctcacagagtacacacagaagctgacatttgaacccagaaggcttgttctagaatatctgctcttaataactatggaaaataacaatcctagcacttagaggtcacctagcaaaatggagaaaggccttgtccttaatccaatgtgtctgccatagttaaccttagtctcctgatccatggggtggctgctgtgcttgaatgttcttatggcctctggcccctcatgggtcctccccctgatcaaaggctcaacacaggggtttggcccacttccctcaaggctgtgggtgtccaggtttccttgcatcccattgaaatcctccatccagggcaccatgtgcagttagggtatggatctcccactcacatgaaaacccctcattaccaatgttttcctaattcacataccagtcctttaaactgaagcttcagttcctcccatcctcacctctaagcaccagtctccagattccttccctttgagacaatccaaaacaatctcctcaagtaaacctgaagcacgaactctgcttatttcctttctgctagttgtgaatttgggactggagggtaatgagctctctgtttgctgcaatgggatggagaaaatacatgatttattcagcaatggtgaatgcacagtactttttcctcatctttaacactgatgtacatggaacagtcctcttcgagccatagcatacccctgaccccatcactgagctcttcctctacctctcacctccatcctatgcccatcccatcctcaccgagcctccaatcaccccccactgccccttttttcctcggttcttccccagccctcatatgcaccctgcacatttgggagaactgcaagcatagctcctgccttttgaaaactgaaataaaggaaaatgattaaataatatttattctacatttttgataaaaaaattttttcaggtaaccaaatagttggggataagaaatacccctttagagaagttttacagattataaatgaaggcaggatgagaaaatatcaccacttttgtgaaccctaatgaattaatccatctaaacaatgatcaggaatggctgccaaaaccaccaaaaagagaaaaggagatataagaaggcattccctgcttcctaaccaaaccaaaccattccctgcttcttgaccaaacgaaaccaaaacaaaaaagcacacaaaaaccctgaatcttacaagtctgtaaatctatgctgttctacaggagaccccagccacatgcagctattggtcacttgaaatgtggttaattctgagagatgctgtaagtgtaaaattcatactggatttctaagatttcatacaaaaaaccccaaacctcaatgattatcatgattgtatgttaaaatgctcacactttggatatattgagttaaatgaattgtgttatttgtaaaattgcatctctaaaccacatctcacacctcccttctgtctgatcctgaagcctaattctgcttcagaagcatgggtaagaatcaaagcaagaaacattattacttaggattggggtaaaacttggcagcaaggtgaagttcaacatcagggtcaggtttgattttttttttaagttaggaatgtatcaggttctttcaaaatatccatgcttcagagtggggatagacaaataccatgtgctcataggccttatgatgggtaggaagaagtggagacaaaaggagaaatcttgaggaaaggccccaggcaacatgaaaaagccgataggaatggtttggactagccaggcatggtggttcacacctgtaatcccagcactttggaaggccgaggcgggctgatcacttgaggtcaggagtttgagaacagcttggccaacatggtgaaaccccatctctactaaaaatacaaaaaaattagtctggcatagtggcgggcgcctgtaatcccagctacttgggagcctgaggcaatggttgaacctgggaggcagaggttgcagtgagccaagattgcgccactgtactccagcctgggtgacagaggaagactctgcctcaataaaaaaataaaataaaataaggaatggtttaagctgttcaggctgcactggcatctggtcttcctggtagccctaactagctttggccttgattttatcttcccacctcctcagctgtgttctgcatctctgtctcatcctcacccctgccatagggaatgttgcttggatatttgtttcaagacaattgtaaaattcagaagggaccacagagaattattgcttcatttgaacatcacagagctagctcagtagtggggtgcagctgtctaggatttgacttttagtagggatagtgtgatggatgtgctgcagcatcacccagcctggctctggattccttctccatcacttaccagagtttctaaataaagtcctgcatcagcttgcccagacttgtgcagaaggtaagtgacaatgacacctacatagtgcctcctatagtccctggctcagaggtggttttactgtgatgctcatgaaaattcaggttcagggaccctcatagtacagtgactccttcctagtgcccttgggaaggatttttagcaaattttattaatgatatagtatctttctcagagggcttttaaaatgtgcttaagctcaactcccccactcataaaaaatggatctgaaactactttggcccatttgagttcttaataaatatatctgtgtattctgtccttgctcgtacctgcctctttatctttctatattactctttagtgcacttctgcagggtccaaatgtacctacgattcccattttctatcttccctaggtcctgtttatgtaagtggtaggcagaataatggactctcaaagatgtctacaccctaatccccagaaactgaatatgtcaacttacgtgacaaaagagacactgcagatatgattaagttaagaatcttaagatggggtggattattttggcttattcaggtgggcccaacctaatcacaaaaccctaaagacagaattttcttggctgcctttaaagaaaaatgctctgttgttggcttgaaagagtgaggaagtggccacaagccaaggaatgtgggcagcctcaagtagctggaaaaggcaaggaaagagattctcctggacagcctggagaaggaatgtagccccaatgataactttatttcagcccattaggacccatgccagacttctgacctccagaactgtaagctaattcatttgtgttgttttgcgccactacattcccagtaatttattacagcagtggtaagagacaaatactgcatgaagatctgtttttctcttttcatcttactcttccagctgcttgtttattgatctgcctggtgatctttttattctttttacctcattttattcttttacctcctggtaattgtatcttttctctgtaagtcatgcataaaaaaacaaacagggctttctcgctggcactacccctttcatataatttattaagagtcctcctctgaaagggatttgcttaaagtccaatttaattagatttagcaccctgatatattaaaaatcccttagcatgaggcagctcttgcttatgggaatacaccctgaagtcaatgagaagctcaaggtgttagtttcaaattttctattttatactcttgtgacttttggcaacttaactaacctctctgagtacaacttaactaagctttcctagaacaaaaaactcacaatatattcatttccattccttttattgtgtttttgaaagatatttgtccacccaatgcaagtggacacttgacaagaccctgaattgaaagccctgtttgtgtttccctcccttgtttatagctggttttatgactccatcttaaatgtgcacgtaaggctcctgtagatgctgatggtgagtgatggggtctccgccttttaagtaaagcatgttttcctagaagctcagagtaagatctaattaaagtttgacacctcacatcgatggtgacctgagggttgcataacgatacctgtgtcaccaagtagttgcaaaaattaaatgagactcgtggaaattatagggcctgcacatagaaggctctcaatggtgaaatcacaagtcaaggagtaagcatgtcactcttttcttttcagaaacttgagtgtatttgaatatttacaaaatcatcccttcgcttttgcattgacaaaccgcattatctgaatccgcttagtggatactctaaatgagagtctgtatgcaaaagcactttgggaaggtaacaaatgctagatgtaactgtaaattcaaatttttaattatatattcatttttgtaaatctttcattcccagaatagaggcaccctattagtagagcgtgaaatgaaatggtatgacatgctgggaagataaatgtttatttgggttgatcagtttctccccccatgacatctgaagctcactcctgagatgacaggaaagctttaaagaaagattgaatcaaacttgcttcccttttttgtcttcctaaatgaaaaggagatgaacaacagtgaagtgttttattatttttttcattgatgtgtcagtgacttgaagagttagtggtgagcaattgtaaatattgacatccagcaggccaggaatcaaaccccagacctatctcttgaaagataatgggaacatggactaacaacgttagagctaaactttctttaacataaaatgagaataataaccatagattttcaaacgatgtcataagagtgaaatgaaataatttctttttaaaacggtagtgtggtcagactattccaaccaatacattatttgccaagcattatggagacagggatgaagacagcacacttcctccagccagtgacaatacaaactcaatgtctggtggaagaaaacaatgagtaagccaacaattatggtctagttatatgaatgtttgatttgaggtttcctttgttatatccactaggagatcgtttcctagggagagggcttggagagatcagcagatgagagaccagggaatctgatctgatccccctaaaacaaactgcagggccatcagagatacaatccctacagagtttcctctgattttagcatcatgatccttttagcaagttcagaatcacttggagaaaagagaagaaggtattgtcctcaaaactgacaccgttcccttaattaactcatcaaattttgtagtacatttgcttctctgaaggacttgtcttataaatgcacttctctgggccccaaagtgaaagatcagctttggtagttcatggtggtattctggtacctgtatgttaaacaccgttcccaggtgatagtaatgtgcaagaaagttcgagaggctctgtcttgaattctgcaatatagatgtgtcagattctttcataatccgcaaagacatgtgcctcctttcagtcatttgtgaaaaagcatctttgcctttgttgagcagcacttggtatatctttgctgagtagccctgtgtttctgcccttggctacagagattacccaactgcactcacagttctccaggtttacacagtttctccaactgtgttgaagtttctgcaagtacatgcgaagttacacagagatgtgtaaatttccctgattgtatgcaaaatcatacagatgtgtacagttttcaccacatgtgggtgaggttctccaccatttgaataggcccccaactggcctgtctcttcctcatcaggagcttctctcacttggattcaggaacccatgcaaagggttcccttttatccttgctttattgtctacacctgcattttcctgcctggtgcatgccctttgtgaaaatagctatagtactcactaatttcctccggaaaataaaagctaacccatcgccttgccctgcctcaactgtagatcaattcacctctgaatttccctgaggatgctcttttcagattggtgtgcttttcagattggtgtggacaaaagcagaaaggggagcgctgaaatggaggggaaccccctccacattgttctgtagctatttgggttggttgcaacccacaacaagaggaaaatgaaagtcctgtctgggtctgggatgcctctattcagtggtttgaggagaaagcagcgtttaccgaccctgccactgaactgggagggagagggggtagttaagccattggtctggaaaagctctctggaaaaggtgatcacagactattaacctggcagtagattggcagcacatgttccacccaccagctaaagtgccagagctacattaagacccacaatactttccactggctaaagtagatagtattccaactggaacaggggagaatctaagcttagaaacaataacagctaaaaacaataaattgaaaccagaataaataagacatcctcaacagattgagatctgatgttggagcctcaatgcccctgcctgccgaggactcctgcctcctcaatgaggcaggcagagctgagctttcccaggagtcttagagtttgcacagacataaggacagaaaaggaaaggaattaccacccttaggagtgatctacaaatagcatcccaggataaggacagggcaggctcttctctttagcatctagagtccataggaacagtaaaaagtttaaatcgtggatgccatttgtttttctagacaaagccttctgctttcatcccaggatttcaaagcccctcacagccattaattcgtcgtaagcaattcaggcctgtcaacgtttcacacctaatcaagagctgatatctgtcaccccaagggatctaaccaataattcctctgcacgctctcctttcctatacccttctcccaagtcagttatttttttattttatatatatgcatattttaaacttcaagatcccctcccccttctttttttgtgtgtatgtttttttttgtttttgctcttgcagtatctgactccctttcccttttcttacccttccttttctgcctcttctcccaaggtttctttgtttgccttcttattttccctggatggagttgggaggaatctgtaaaccaaggggcttgagaccgacatacggaagtccatgagtcccaggctttcacagagaaagccccaaatgaagatgggttcctggccatgaatttctatttctcatgggacatgattatccgtgactaatttgtctccctgggcagacaaaaccactgccaatgtaccagctttagtaaagctgttcagggctgtgatttccaaggaaagtaaaaaaatccagctctatgttttcaacaggctcaagacttcctcatgccctcagtaaagacaaaacctgattccattgcaataaatcacttagagcaggaatgataagcctgctgcacaggtctatcactctcatctccatgcccgtgcagacatcactaatcaagcatagcactttcccccacccccatcccatatccacctccctgccacagctatctcagaccctgaattcctctcaagaggaaatgtgaaaactccttgccatctctgatgcagggcctttcctaccttgctactcaccacatccacagtccatctttcttattttgtttgtaaattttaagcttaattattttggactttttactatatgtaatatatttaatataatgtttaatgtaaaatactaatatactaatattttatgttcttaagcgtaatcataaaactaatatctattaacttactaacctaaaataagaactagaatattactaataatctgcatttattgaaagatttgtctccacccacaccactgccttccatccatgaattaacacctatcctgaattttgtgtttaacatacccatgctggctggcatatgtgtgtgtgtgtgtgtgtgtgtgtgtgtgtgtgtgtatatatatatatatatatatatataaaataggtatacaccacaggcaggcacataggtataccagaggtatccataggtatacaagcatacaaatatacaattttagcacatatgtacacatgtacttgtgcatataattttaccacataagtatatatgtttgagactatatacttattctcaaacaatatatattttagttttgcttatttctgaactttcagaagtaatacatattatcttgcacatagcaatgctgtatatattttcactgatataaagtattacattacaaatatgcaacccaattttgttccaggtattattcatatgatcaggctttttccaatcagattaactgtgaaaattctcaaatattttcatggttcaactgtacaaggtgatttctaacatgcatacttcagagtagaattgttatatgctagaatttgtgaatgctcaaacttaccagataatgccaattcatttaccagaataattgtgtatatttacaccctcatcaacggttttagaggatttcctgtcagtgcctttctctcaaatacttttgatttttatacattttccaccccacctcaatctagaggatgtaaaattgtatctccttgtggtctttacttgcattccctagattaacaattagactggacacaattttattgatttatggatcatttgtgtttcttctgtcgagtgtctgttcaggagctttttcttccccccttctctttttgttattaatgtcatgagttgagatctgtttgtttatttaatatatcctggattttaactttttgttagatagcaaatcttaaagattgtgtcctgtattttcactttctttatggatcctgttaatgaaagttcctgatttcatcactttttttttttttttagacggagtctcgctctgtcacccaggctggagtgcagtggcgcgatctcagctcactgcaagctccgcctcccgggttcacgccattttcccgccgctgggactacaggcgcccgccaccacgcccggctaattttttgtatttttagtagagatggggtttcactgtgttagccaggatcgtctcgatctcctgacctcgtgatccgcccgcctcagcctcccaaagtgctgagattacaggcgtgagccaccgcgcccagccttcatcactattttactaatgtatatggtgcttttgaaatataagtattaatcttttgttaaagataaaatatcccaagtatgtgacatattttcatatgtctgttaataaacataatttttttcttactgttctatttttgtttaagaaattattttctacacaatggtaaactaaagcaaagtgatgttgtcacttctggaaggaagaacataataattgccagtgttgagctcttcagccttgtttttctgctgcatggagaaccctgaaggcttatgtcgagatgttagtgtcaaaaaaaagttaaatcttccgtcaacctgtgaccctgagtgacatctacaaagaatagaatccaatccacttcccaccaactcaggttggacatatagtctgagtaagactttgttattttatgccactaagatgtgagggttgtttcctaatcataacctatcctatcctgacaggtatagtaattgtctcagcacactgactgaattactcttctgtttctcaagggtacaggatacttcctttctcacaaatcaactttctatatgtgtgtgggtctgtttctggaatcttgttttgttcgaccagccaaattgtctgtccctgaacaaatattatactaccttaattactatggtttcatatttgtatttgaaaaagcaaaccttcctatcttattcttcttcaagaatttgccgtgctttgaccctttgctcttcaaaataaatcttgtagtttgccaaattacatgacaaaccccattagatttaatgagaatatttatagatttactttgagtaaaactgatatttctgacactggctcttccaatctagaaacatagcatgactctctatcttgtttatttttagttatttcaataaactcctatacttttccagacatagtatacacatttgttttatttatttctatgtgacatattttgagttgacttctaattttaattgtgaatgacagttttaaaacttacatattccaatggtttcttgttgatgtatagagaagcaaacaatttttattttttattttaaagccaactaactttttatcgactctcgtattaattctaacaatttgtggattcttttgattttctaagtaaacaatgatatcatctgcaggtgatgctagcttggtaccttccttttgagtttttttgtcttaatttctcttccttgtcttactgccctggctaggaccctggagccatgttgaatataaacttcatgtttatattccttgtcttactgccctggcttggaccctggagccatgctgaatataaacattgaacttctcatctttttctagtccaaaggaaatgattgtcacacttgaccattaagaaagttacttcaactaacaaaagaaaacccaaggatggaagtagaacagttctattgttcaatctggaataaagtaatgaataaaggcattggacatctgtgacctttaacatcacaataaagagagaacagacattatgtgactcccggtaaaaaaaatataaccccctagaatctgtcctgccaaagagattggacttaaatctctgtatccagctgccaatatacaggaaatgcaaaagataaggaaaatgttgagctacaccatgaggatgcactcagcaaaatccaggctatgaaggagtctataggttaaatgccctgggttcttccacaaataagttataaagaaaggaaaagatgcaggaggacctagagattttaaaaagttaaatgatatatgttttctttaaaccaaagtgtccaggatgagataactgtaacaagaagtaaagatgtaaatagtgataaaaattacgatgaggtttatcattgagaggagagcaagggttgttatagaaacagggcacatggtgggtcttccatgatggctagcaaagttctctttcttgaactaggggtggcgattgattacaaggaagtttgcctcattaaaaaagatcattaagctatacatcttgggtggttttcagtatttttattttattctaaaataaaggtgaggaagttctatccctatttataaagattttttttaaatgaaggatccacatttaattttttcatatgttctttgtgtatcttttgaaatggccatatgacatgttatttcttcttacatgtactgatggtacatgtaagtacagggtactgatggtacatgtaagtacatggtactgatccatgtacttacatggattacatgtactgatatgctaacatgttaaaccattttacattcctagaataagaaaacagccatttttttctatgaactacaatatttaaccactgctagattctgtttgctaaaatctgcattcttgtgcatgaatgaggttatcatctactggctttagtataaaggtaatatcagctttaaaaaatgaactaagaaatcctcctctgtttctctctaagactttgcataagattggaattatctgttccttgaaagatcggtgaatatcacctctaaaatcatcagagtcaggtattttcatcatgaaaagatttttaacttctcttcaattactttaatagtcttatgttaatagttatggtctaattaaagatttcttatgtcttcttaagtcaattttgttgttatattttcctaggaatttgtcttttttatgttttttggtgtattggcatgaagctacttacagtattttattacatctctttaatctcttctgcatctatagcgttctcccctctactatttaataatagtgtcaatttgtgttttatctctctttttctttttctttaccagaaatttgaattcttattagctttgtcatatagcaaacctttggtttttttatattctcagttctgtatttgttttcagtttcatttatttcttctgtatgttcatcttccttctgcttcatttaatttgactctattgtttcttttctaacttcttgagctaaatatttaggttatttatgttaaatttttctcataaaaaatgtaatcctagcaaatgttgctacatctcacaattttgatatttagtattctaagtagttttatatatttaaaataattttcttactgatacatacattaataagtgtgtgttttattatatcttattatcaccttttaatgtgattctgttttgtctagaaaagttatgtttgatatcaattttttgaaatgttttagaattgtcgtatggtataataccttttaataaatatttcctgggggcttgagaaaaattcttattccctagttagctgtgaacattaacagaagtttattgtcctaattgttttaattctatatttttattaagacttttgttcattttacctatcaaaaattgaattgaaatcttccactacagtgattgatttgaccatttctttatcaaatctcatcaattttgttgcatatatttggggatcttttattatgtgtgcactagtttagaattattatacttactagtgatttgaatcatttctaattatagtataaacttctctatttttcataatatgttttgtcttaaactctattttatcttatattaatataagtactctagggttttttttagtgggggtcagtctactttacgtgaaacaattatgtgtcctccagtttcagttgtgtctcttggaagtagtacataattggagtttttcttaaaaatccaatcttaaaatgtcaattttaacagaaatgcttatatatttagtttattgaaattcttgtcatatttgaactttttctgccagtttgattcttcctgattcactttttctatttttctattttcctttgatgtttcatctttttcattgtattggcttttatgtcttttgcattttactgtattttttttcttccttctatgttttagctactggtttagaatttatgaacattatctctagggcttcaatggttacccttgaggttttacatttcaaatatatataaattatatttagttagatatatttaactatataaatattaaagataatcaatacgttaaatcctgtaactaataaaagaatattaaaactcttacagttcagctgtagttctttcagattaaatgctcttcttacccactgtttaaaccttgtctttttaaacctccaaattgaacattattttataattattgtatgggaataatcatatttgcatgcatatattttattggtttatactgacatgcatatttacaattttatttgttcagtattgcttcttacttcacagactatcttctggaatatatttttttctaaagtacattctttatcagtctccttattgatagcctatcagcactaaccttcctctgcagtgtttaatgtgtgtgcttgttcttaaaagtgcctttatttcatattcattagtggctggtgaaaatgctcacacatgatcaaattctaaaggcaaaaatcaaggcagagcttgatatttaaacaagataataggtacaataaaaataatgcaattttaaatatgaaggcagaggtatggtttaagttcttcttttggccttggataaattattcagtaatattcattaatttatgtgtgaaataaacatatggtgtgtatctgctaattgcttggctctgtcctaggtgttcacaattaaaaacataaggcatggtttctggctacaatgagctcagtctataaggagattcagacacattaatcagaaagttaaaagatgattttgtaacggggatatctatttatagtatcttaagaaaacgtccatgggaacatctacctgggtttgggatggggaaggttggtgagggttggcttcctggaggtcatgtgagtagaagaggaaaacgtatgcctaaagaggaagaacagagagaagaaaaagaaaaaaggaagaaaagagaaaggcccagtaacaaaaatctgaatgccatgtatagttaattaataacatgaaggtggggcatacatttgaggtcataagatgttagaggtttaagcacgggccaggtcatgaagggtcataaatgctttgccaaatgttttggactttatctcataggtcatgaaaactcagtaaggagatgaaatgataatgacaaggtcatatttatgtttcagattgttgactccagtgagagtgaagaggccggatgggggttggagaggcagagctggtgtcccatctggctctgaaccattttatagtccaggcaagagctgatgaagactaaatgaatcagtgatgttattgatggacaggaagagtataagaaacaaactctgcagatgttttttttttcagccatactcatcacataagtggtgagtaaaggagagaagaagcaaaaaataattcattgatttctagctctggtattggatagatggtatggccactaccccatcaacaaaaagaatttaagaggaaatgcagttttaaagaaaaaaaaagttgaatttattttagaatattttggattttagatgccaatggtcattaaagttgaagtcattgaatctgaaatgcctatcttcaagctttagctttctaacacaggaaggcatttatataagccaaccctagggcacagctatagcatataattccaatagaatattggggttctaaatttttggtataatatacctcataacaggctctagagtatccaaagccaagcctctctgaactctgaatccacagggtaaggagggaagcatcatgctggccaacacacatgcagtattttctttctctcatagtctctggtctctaaaaattgaagctcatttggcttagatggcctagtttaaggtcatttcctttacctacaccagagtctaaggtggcacatgctttatcaggtgtttgtgtaggcagggactttacctgtgaccagtataatcaggcttcataatgtgtctttacctatttgcttaggaattatgtgtggcccacaaaacatggcccaggaattattttatattcctactttgacattctctgcaacgactatcaacccttgtcaccagaacaactcaagccgttctctctaagacctgaaacatactctgtaaatcaatcctactcattcatacactgggagctacccagacccctcttagttatattggctgtatgcttatcagaatttacctgaaagtttctccatgcaaaatttctccccatagagttatccaagaccaaatgatatgggttctatatttcctctggagctggaatctgagtgaattatccttagatcttcactgtcattcgagcatcacctctgaaaaaaatctctacgtttccaaggtcgcccctggaaatgtttttctagaagaaccagatatatgactcttccaccttttatcttttagaaaccagagcaatgcaataggaatggtaattttgatgccctaaccaaagttttatcagactggcatccaatcaaggatttaaccacttaaatattgtgctttgataaaagttctactgagaatttgtgattattggagttcttttacagggtacttcataagccattacataagacactaattatccaatatttctaccagcaggtgatcttgtactaattaaattaacattgaaaactgctaacatcattgattaagggtccaaattgttactgtatatcagtaacaattaggacaacttcattttgggcaaaaatcaaatctgcctttccctttatcacaggagattaattatcatcttttcctaagaaaccaggctctcacctaacaataaaggctcttgtgatttgtctacattttggcctctaattatgaagtttgaggatggcagtcatcaggttcatggagtggttaatatcaagaaatctgacttcagatttggttgaacatattcaaatctcagccctgccacatagcagatatatactcctaagccaagcatgatcttccattgggctcagtttctttttccattgtacagtaataaaaatagtccctaccttaaagggctgtgatgatccctaactgaggacagccttgtaaaagagttaattatcagcctgacacatgaaaagggctaagtaaatggtggttattgccattatcagttgtgtttctcattctcttgtgctaatgatttaatacacttccaatatctcttccaaaaaccttaaagttggaaggggatgttgagaagatcaccttaacgaatctttaactttactgagaagcaaaagtgctgacttaataggatccaagggagactccagtggctggtcattatacctggctatttccctttttgtaaaagtcatttgaaaaacattgaataacaaataaccatgaagactttatgatcaaagattcccagaactactgtgaaaaggggaaaaaccatggaagtccatatttccagcccagccacactgtggacagtcctcaccttcctttagaacttttgctcccaaatacagagaacacctgtgggtgatttggagccattgtttttgagaattattctcataacatcaattttaaaatatatatgtttaatctatcactctctttgtgccagccatcatgctaaacttatctgcattatcacattctgtcttcatttgaaggaggtattaccattacctccaaggaagtataattattcccattctataggttaataaactggactcaaagagggtaattgacttttccaaggtcacccagctagtacatgatcaaggtggaacttgaatccacattgttcgcattccagaacccacagccttaactaccatgcacaccacctccatgggtgaagaccctcttctttcctgtgggcatccttgggagacagaacacccaggagctcctgagtaccatttttattttggactctctgatgcccaggatttttggtggcaattcggccacctttggataagtttgacatcttcataaaattcccattagccctactgcaaaacagtgtaaatgagccatcatccaaattcccaaatctatccctggccttcactccttacaatttgactgacaaggtagccagtaatactatgtacccagaagtttgcaaattaatgtcttcttctggccctccctcattctgtcagagaccctctctcccaagccccaattaccaaacttcatctgaagcctcattttcaattctcttttcactagaagttccaagtgtctcctaacccagccttttcaaaactgacctaccctctgtaatccccaaatctcccttttctctccactctgcctcaaacccttcgcagggcccaccttcctcagatcctctttttcagtacccacattctacacttgcattgcagctcagcctctccttctgtgcctccccgtccacccccttacacgctcaggccctataactaagcactccatctaatggaccttcttacttagcctcaatgtttgctttccgatacattggatttatagagtgtttgcctgaattaaaatgcgaaattttagagcaaaccaggcttctcagctgctaagctccatcatgtactttaaataaggaggagggggagtgtgtgtggaggggtgcctgatgcattgacctacccctgaattaccatctcgacccaggctgctcaccttccaacccagctggtgcctacctggccctactcacctcccccagctaaattaacaaagcagttactgctcatccgcagagctccctctaatcaactcccagtgaaataatatttgctttccatgcctactttgaatcccactcactttgttaaaagattgcctctggctgtctctgctggcctaatctaatagtttctagtttgtacaagcaaagcgttttcagccacctatataaataacttaagcaggagaggacacttgtacagccccagtgcagggctataggacatgacagatcccacaatgactccttggccaatctcctgggggagcaccacccgctgagtgggagcaattactgtactccatgaggctgacaggacagtctgtctgtctatagaaagtctgatgggggaaaactattcccgtctgttttctccagtgcaggtgaccatcctaagtgcctcggccccctctatacccctccatactgcctgatccatggtctcagagggagcctgttcaaagtagaaaaagcggagaggaactaaatcaatctattagttttcctctaaaaattgtaatgcaatcaactttgcttttaaaaaattgtggtaaaatatacataaaagattaccataaaagcttaccatcttagccctttttaagtgcacaattcagtaatgttaagtatattcataatgttgttcagtctcgctccagaacatttttcctcttgcaaaactgaaactttgtacctgttaaaatgacagtttcccattttcctctccccccagcccctgagaacccccatttcactttctgtctctataaatttaactattctatgactgcatagaataagtcacacagtctttgtcattctgtgactggctaatttcacttagcataatgtcctccagggtcatccattttgtcacaaatgggggatttcctttcatttttcagttgaataatatgccactgcatgtgtagaccaatttgagcttctcattcatctgttgatggacacatgagttgcttctaccttttagctattgtgagtaatgctgctatgaacatgtgaacatggctgaacacatacatctttgagactctgttttcaaatcttttggatatatacccagaattgaaatttctgaatcatatggtaattctatttttaattgtttgaggaaccactgtatggtttttccatagcagctgcacaattttacattcctaccaacagtgcaaatgggttccagtttctccacattttctccaacatttgttattctcctcctcctcctccctcctcctcctcctcctgctcctcctcctcctcctcctcctcctctgctgactgatcagggtgatggttgctgaaggttggagtgagtgtggcaattcctgaaaacaatgaaatttgctacatgaattgactcttcctttcatggaagatttcttggtaacatgtgacactgtttggtaacattttactcacagtacaacttcttttaaaagtgaagtcatttctctcaaaccctgctgctgctttatcaactaagtttatgtaatattctaaatctttttttgtcatttcagcaatgttcacagcatctatgccagaagtagtttccatctcaagaaatcactttatttgttcatccataagaagcaacttacacattcaagttttatcgtgctattacagcaattcaagtcacatcagcatgcttatattctagttatcttgctctttctactacatctgcagttactttcccctattgaagccttgaacctctcaaagtcatttatgaaagttaggatgaacttcttccaaacttccattaatgttgatgttttgacctccaccatgaatcaggaatggagatctagcatagtgaatcctctccagaagattttcaaattactttgcccagatctatcagagaaatcactatctgtgtcaactacagctttgcaaaatgtatttcttaaacaataagacttcaaagtcaaaattactccttggtctgtgtgctgaagaatgaaggcatgaaaacaacattagccttgtgcatctccatcaaagctcttgggtgactaagtacattgtcaatgagcagtgagattttaaaaggcatctttcttttttctgaacagtaggtctcaagagtgggcttaaaatattcagtaaatcatgctgtaaatagctgtgctgtcatccaggctttgtttttccattatagaacacaagcagaatagatttaacataattctgaagtcctctagcattttcagaatggtaatgggcatgtggcttcaacttaaagtcaccagctccattagcctcttataggaaagtcagccgtcctctgaagcattgaagccaggcattgacttctcctctctgctaatgaaagtcctagatggcactttgttctgatgtattttatctacatgaaaaatctgttttttaatgcagccaccttcatcaattatatttcctagattttctgaatcacttgatgtagcttctacatcagctcttgctgctttgccttgcactttcatgttgtgaagacagtttctttccttaaacatcatgaaccacctctgctagcttcagtcttttcttctgaagcttcctcctctctcttagtcttcctagaattgaagagagttagagccttgctctggattaggctttggcttaaggaaaggttgtagctggtttgatcttctatccagcccaccacaactttcttcatttcagcaataagcctgttttgctttcttatcatttctgtgttcatcggagtaggacttctaatttccttcaggaatttttcctttgcattcacaacttggctaaccatttggcgaagaggcctagcatttagcctaattcagctttggacaggacttctgcacttaacagttaaatcatttctagcttttgatttaaaatgagagatccttcctttcacttgaacacttagaggccatttagggctatcaattgacctaatttcaatattattatgcctcaaggaataggaaggcctaaagaaaggagagagagagagagagagagagagagagagatggggcaatggtcagttagtggagcagtcagaatacacacaacattggtcattaagttcatatgggtgtagttttgtgcccccaaacagttacaatagtaacatcaaagatgtctgatcacggatcaccataacagatataataataatgaaaaagtttgaaatattggaagaattaccaaaatgtgacacagagacacaaaatgagtatatgctgtgtaaaaatggctctggtatgtttgctcaatgtagggttgctacaaaacttcaatttgtaatgtaataacatgaagcacaataaaatgaggtatgcctgtaataataattgtaataatatattccaggaactgttccaaggattttgcataccaacttactttcaacaaagtggtgttggttgcgtttatttaaacagcactgaaaaccacttaaaattggatattagatagttgggtcacattttcaagaactttgcttcatgcctggcaatttttcctaggtctcttcttttctcttatattttcccctctccattcacctgtctcagagattcccaaagtgctgttcacttttcattgagggactcttaaccctttttcatatatcacagtcttttttcagcatcttgcctgaggtcttaccttccacatctaaaccaagatatcaaataatctgtcctggatctcccaatgtccccctccatagggaaactcagagccagtgggatgatgacaaatatttcactctcctttttatatataaaagcaaggcattaggaggcacattttccagggtatacaacatggagtacagggtaaaagtagggccacaggattcctgtgctaaaaatgagaaagaaaacactcagcttctgagaaatggagaggggttagggagaaggagaagaatgcagcaggtattgactgctcacagtgtgctccgggctgtgctgtactttatatgataattttgccttcacaaaaactcaacaaagttggtactattatccaaatagcagagctgagtaaaatgaaggttacaggaattaagcaacttccccaaagtcacacattttgctaacaacagacaacagattttaaacgtctgctctttccactacatcacgctattatactttgtctagatacatatgaaagaaaagattgtttaaacgctcaatgagttgaccttaatttgctgtggctatcattgtgacctttcagtggcaaacgccaagatctcttattctctgtgtctgactcatatttccacgcaccctcatcctcataggagcacgtgcaacaactctccaataggacttaatagaaacaattttcaacaacgtttttactaatttcccttttaaaaatcaataaatggttagtgatgccattaatagagtgaaagcagatttctctctattatgagagttcatatttgtagcatttatcacacacacacacacacacacacacacacacacacacaccagaaacaataaaaataaagacaaagaaaccactgagtttatgagaccctaaatacttggattgaaatttttgcagcccaaagagagggtaatgcaataaagagttctgtctcaggggtcagaaagtcatgagttcaaattccagtggcaagtcttcccaccttaaaggattgtattgaagattaatgtgccagggcattaacagcacttagcccacggtagacaggagatgctgtatcggggctagtcacagatgcagttgaactggtctccttctgtgacacttcctttttggaggcccaggatgtctctccccttctatgcacttcaattccattcctgacctaagttatcccactgctaccctctgcctggtcagcagccagcctctggccctcatccttcctcctccggtttgtgactcactaggtgacttccggaaaatcagttccattctctcaagtttaatattcctctcctttcatatttattataccattgtcagatgcggcccagaagtgatttttaaatgcctaaaactagcttctgatctttctgaaacaacccctgattgaatatgagcgacgttttttctttctttctttctttcttttgagatgaaatctcactctgtcacccaggctggagtgcagtgatggaatcttggctcactgtaaactctgcatcctgggttcaagcgattctcctgcctcagcctcccaagtagctgggattaaaggtgtgcaccaccacactcagctaatttttgtatttttagtagagacagggttttaccatgttggccaggctggtctcaaactcctgacctcaaataatccgcccactttggcctcccaaagagctgggattacaaacatgagccaccacacttcgcctaaatatgagaggctttaattttaatgatgagcaaagaaacacttttggggagattatttttgcagcctggttctggagaaatgcatggcttccaatgagatttcagaaatactgagtatacaacaaatgtcagaggaatttgaagggccaagttatccctagtaataaagagcttactcagccacacctggagaaggctgtgcagatgtcagaattcgatcaaataatattattactgaatgatcagagacagagagttactaggcaagaagatccaggtgagaccagaggccacaaactttgagggacatgcaccaccctggagcagagaaataaataagagacaaagtcagccccagagtagaagggaggaatgcaacagtatttacattttcttgcttgctttgattagagtgaggtctgagactatccctcagcagtttcccttctgctaccctaaaatcaggacagagtactccaggaaacctggatctaggaaaggatctagtaacctccagacacatgctgaatgaacctccttccctggctcattccccagcagtgaagacacttctaagttaaagtctacattcccagctggaaaaagtcatgaggtacctgccttcttcccactcagaatctactattttatatgtgtgggggaaggaaatgggaaaatatcaccccagccctgctgggagggatgctgaatcactgagctcatgggatgtacccatattaaagaaagtcaactccagaaaaccaccaccaagtgttagcaagcccctgttccccagcagtgccaccccaaatttctggcatttaagagcgcctccttctcctatatcttggtttctatggaaaagagtaccaacctgccagatgcctttggcaagggaaaaggaagaaagaggtggactcctggggggacaaacatggggaggctggaccttgggtatttgaagggccacatgcaaatgtaatgcaaatgaagtggacccataagagagagggtgctgttgaagacttgctgtgcatgtgttggagtggcacccaaacatttcagcctccccttctttctatacctgaacaagtagttggagacaagtaattccagcaagactgtgccatagttctactacatgtggactagagaaaggagaggtttctcttttctcagaaaactcaggtcagtgatttactcaaagaattattaaggaaacttcttgacctgtcagctgatagggtacactgaaaagagaaatctttccattctatgcctgagcccctacctgaatcctttcccccaagaatttgggttttattaaaatgatttagtctatttatttatttatttatttatttatttatttatttatttttgagacggagtcttgctctgtcaccaggctggagtacagcggcgtgatctcagctcactgcaacctccgcctcccaggttcaagcaattctcctgcctcagcctcctgagtagctgggactacaggtgcgtgccaccatgcccagctaatttttgtatttttagtagagacgaggtttcaccgttggccaggatgatctcaatcacttgacctcatgatctgcctgcctcggcctcccaaagtgctggaattacaggcatgagccaccacacctggcctagcctgctattttatgagcccctcttatcactctcactaccctctagaacagcaagcactgcgagaaagaacccagcccctgctccatgtcctgagtcaagaactggccgagctaagacaagaccaacacagctcttgccctagagctcacagcataaatggaggtgctgactcaatggtcacatggtccagtgagggtgacactggagctatgtataaggtataagggaggatatttgaatgaggccataaaggagtaaccatttaggtaccagcagaggggacagtggcagcagatgtctggatgtttcaatagaagagttgacccctgacttgagtattcaatgatgagtgtcagccaagcagaaacagaggattagtatttcagatgaagcagaaatatgagggaatgacagaacaggctgggcacatgatgggaatccccagaaaccagtctgcctaaggcatgagagagatgaaattagaaatgtcgctgcaagcttgctcacacagggccttttaacccaaggaaaatgatgtgattcttgggacagtaaagagccactgacagttttagtagcagaagaacctggtcagaatacttcatttgtggttggatagggacacatctggaggccaggagaacaattaggaaggaactgttgggttccaggataaagatgttttgggtcaggagcaagagggtagctgttatgttgcagatgaggagatgggtgaagaaatgtgagaaagaaaagagggggatcagtgattgctttggtatggagctgaagatgagaggaagttgatggtgacttccagatttctaacttgggagaaaggaagggacatgggttcaggcaaagaaggaaaaaatcaagaaatcatcattatagtgtcaagtattccttctgccactccttctcttcctcaatctctgtctccctccacaccagtctcttcgcagggctccagcctgtgtgaggggctctgaatgctggtgcttgcataactgatgaggatgagttaaaggcagcttctagctgagatagctccagctgtggccacagagactaataggattgcccagaagggagaagctccagtgaatggaggaaattctgcatgcagtctctctgactttcagaatcttctggtccagaagtccttctgtcaggtggccttggcatgtgaccagccaaccaagagcacagagatcccaaggtttccagaaatcacaagaaacatccaagaaacaattctagagaagtctgtggattactgttctagcagtcaggtccagaagttggctacaagagacgagaattggaagagggaaaattcctcaccatcaagccaacgtcataatcctgaggacatgagcacagcaaggaatgacaccttcctctaggatcacttaaaggatctcagtgtcactgagctgaccacagtgtccttgggtggaaagaatggatgttgtgtagcactttggagtcagcagtttttatacatatgtgtatatatatatatatatatatatatatatatattttttttttttttttgagatggagttacctaggctggaggtgcaatggtgtgatctcagctcactgcaacctccactcccaggttcaagtgattctcctgcctcagcctcctgagtagctgggattacaggtgcctgcccctacacccagctaattttttgtatttttagtacagacggggtttcactatattggccaggatggtcttgaactcctgacctcaggtgatccgcctgctttggcctcccatagtgctgggattacaggtgtgagccactgtgccccctcagcagtatatattttttaaatctcatttcagactagctctgtgactttaagcaagttgcttttcctttctaggactaattgtttttacatctgcaaactggtgatgatgatctctatttcacagagcaaagggtaggtgaaatgacaatacaaggtctggtcaatattagatgcttagtaattattcattcaatcattcatgcataacatacttattgatttcttctacatgccagacactgtgcttggtgcttgggaacaaaacagagaaatattttcacctaagtagagctttattctaacatctatatgtaggggaggacggaagaaagacaacattcaataaggcatagtatgtaaattatttagtttgttagaaaatagtaactgctataaagtaaaggaaaagtcaagcaaggtaggggaaagggcagcaggagtgaccttgaacaagtcactttatttgcctgaaggttttacttcacgtgtaagtcaaacacaacaatacctacctcacaaggctattgtgcagaataagtgagtgcaagtcacctaaaattgtacctaggcctttatagatgctcaatagtaatagttatatcatcgtcaccattatcatcatgaggttgcaataataattgggcaaatcagaactcatttagaaggggccatttgagcaaaactggaaaatgatgagggagccatggggtgtacggtgtgcatcccaggcatgggaccactcaatgtcaaggccctaagacaggagcagggatttcaggaaagctgtgccacctgactccaccggggagatcagaaggggctcagaaaagcatcccctctgaaagaagctgagaaaggggaagaagcagttggaggttgggtggccccaagagaaaaagaactttggagaactaggctgttgctgaagcaacaaaaatagaaacatggaaatttctcccagctgctgtgaactgaccctggaacttagagccaaactggtggtcataaagtcagcttcaagtttgtgtgcctgggtttctgcatccttcgtgaccatgtgcatctttgtgtacaactgcatctatttgttatattttgtgtttgtgggaataggactgtgtctctgacacatgcgtgtgtgtgtgtatggtaatttggaacgagaaaattctcctctttctaaagcgatgtacatacaatagaggaagtagagacagagtcatcatgcttcatttcatatccatacttgactttcaacattgaagttacttacctttgagggccttaagctttatcccaccatcctctcacaggtgcaatacttgtcaaatgtctaaatgcaccacagcctcaggcctgcccgaaatttagtcatatgagatgacatttatggggcattgaggataacgatatcacccattctctcaaacattgtattgttgtgtatctacagtgccagaccccagggttagattctgggaatataaaaacaaggggccattgaaggttataggctttggaaacacgttggagtttgagtttcagctaattcccgttactgcttgtgtgaccgtgagcaagtcaccttatttttttaagggttttgcttcatctgcaaatcatatacagcaatacccacctcccatgggctattgtggagaataaacgagtacaaatcacctgcaaggtaactaaaccctgatagatgctcaagagtaatactgaagatcatcatggtcatcaccatttccatcactactgaccaaagtttctgccctcacatggcatgcatattggccgaaattacaattccactgccttggtctctgatcctagatctttccatggcttgttatctagcttcgtttaggctattattcataaaaccttcttcagaaaagtttccctgaccatccacccgcttttatttcttcactgcacaaatcgtttcctgtaattctgttatatgtattgtttttgcttacctgtttatttgtctccttcagtcaagtatgcttcatggaagaacagtgaccttatctctctagtttgctctagaatcagatgtgaactttatcttcagtatctaggacagtatctggtacaagaaggtgttcaatcggcatgtgttgaatgaatgagtctatgaatgaattagttaacctgatttgtgccattacagagccccagaaaaaaatgcaactaactctgctgaaaccaaagtattcctgtagaaagctttacagagcagagagcatttgatcagggagactggcaagggttctccggcaaatgcatgaaggggcatgatcatagctactaattgtgactgtatcttgtgaaacaaaccaagatcatcaatcgtgttccccgtctccctggagaacactgctgaaccttaacacatgccctgggagtgtgtggaaaagaagaaaaaccccaaatttctgactatgcataatccccttcagtcttccagaagcataggtccaaacttcatttgcatataaatggtcataattttttaatcatagataaattccattctgtttgcttgtccttttgccttccttgatagagaaacaagagtgacttatgattcatgaggaacagcaattaaaacacatatacatacaacacttccttacttcttgcatctcttttcactccttctccctccctgagtgtcagaaaatgccatcttgattgagaggtagtggttacacagtggattcccatggtttctttccaaatcctaggttcttcactcactttctatgcaattgcggacaagtcacttcacctttctaaaccccagcctcatcattcataatgagtaaaacataaaatcatgaaggttttttgcataggctaaaagaactggtgcacctaaaatactaacataaagcaagttctcaaaatgaaagttattatcattttattagtatcatcatattgtatgaaaatacatagagatgactcatttcaaatcagcaagagaaacccaaggtcttactctcagcagagaagagagagaaataaagctactatataggaatgttgatacagattatacctagatggtgatcatattgagaaactctgtatttcatctcagagagatcttaaattggaaaatagtataggtaccactcaagagaagatctggtccctgaaccttactaatatctgacattaggaagtagaccagcacgacaaaaatcagtcatcatcggacagagatctatttgatacttattttaaagacaactgtgttggtttctgtttcaagccctttactcttgttctgagatcatctgtgggagagaaagggcaaagtgcaagtgggggtggaagtgacacgtatcaggtcctcctgcaggtgttttcttgctttatctcatccgattttcacactgccctctgagacaagatttattatcccaatttgcagatgaggaatttgaggcttaacagggttaagtaatttgctcacatctgctgaaggaaagcctagacttgcagtcaggcatccagaatactttcatttataacacacatcctgttttacatggatattgaagatgtgggattattttttagccccagtttgtggacatctcttgccagagttattttcctaagaacctagaatcatttgtttgactgtatatcaggcttctgtggatgcaaagcccactagcaccatgcactcaacatttccaaaactaaacccaacatctgcccactccctcatttccacgatctctcttcccagagatctactccttttacacttttttccaaataattgtctttccccatgcatcactctagactgcttcttcaactcacctcccatcatcacataagtcagtaagtcttatctaatattcctttgaagatatgtcaagtccaccccaccagctccagctccagcttcactattaagtcaatttatatctcacttgaagcaggtagctgtagcctcctctctggtgtccttgtcctggtatttatcactctagcccatccttttggttcggccaagtttattgtcttaaaaacaaatgtaatcattgtgccactcctctgctgcttcaaaacctttgaggactcccttctgtctacatgttgaagatcaaacaccttagcaagtcacctgcaatataactcaacattatgcttttgtctcatctcttaccagcccccatggaaatgcctaattattcctctgaaatgcattgcatgtttattctcttgtatttttcccattttaaggaaaatcctactctgatttcttgtctgttaacaactacttaatctccaaagcctacagtgaatgtcctgtcaatctcaccaaacttccccagacaaactcagctccctcccttgtcagtacttcatgcacactgctatcattggccctaccctgtgatcatttttacacacacctgcctccctcagtatagcaggagcttctcagagataaatatttttttttcacatttttcttcgtctccttagtatctagcctgagaagtttccgacagtgagaattataatgcaggtatcattttgcatgttaacactaacatatcataaacatgttcccaccgagctactcagtcttcctaattatccttttaattgctacataatatttcttcctgtttatgttctataattacctaaacattcaattcaagtcattaaattcaacaaaaatttctaagtacttaatatgcggcaggtaccatgctagatgctggagacaccaagaggaggaagacatgacctcttccctgcaaagactgtgcattccagtgatcatgtgataagggctatgatagagatatatcaatgaatggattgggaacactgggtagggggagttttatttttcctgaagaagttgaagaacataaatttataggtgatattttctttgagttttaaaagttgaatacaaacctaagagaactggtaagaaagcaaagagggagggtgagagaaaagataaattactaagacctcacagtttttaaggggtcagagctaggatttcaatacaaacggtttgattctaggaccccactgttatcccttatctgctggtaaattcctacccacccaacaatgctttgcttcaaccagctccacactctttctcagttgttatttatttatttatttatttattttgctacagagtctcactctgttgcccaggctggagtgcagtggcgtgatctcagctcactccatctcccaggttccagcgattctcctgcttcagtctctcgagtagctggactacaggtgcacgctaccatgccaaactaatttttttgtgccaccacgccaaactaaatttttgcatttttagtagagacggggtttcaccatgttggccaggctgatctcgaactcctttcctcaggtgatccacccacctcggtctcccaaagtgttgggattacaggcgtgagccaccgtgcccagcctcagttctctttttattcagcccttatgtgttgcacagagctggggcgtgctagcaaattttctccaacccacattttcgttaagtttgataactagaattttgcaaagtattttttttgagttttacaaaatgagctcactaatatgatgcattctcatcctttgttcctgttttctataagaattgcaatgttaccaaggaaacaagattctagagcaaattcctgataaatgttaggttctcaaaagataaatgaaaaaatgatcaaccaatggctaaatgtatgagtttggctgtgtggaaagtagagaagaattagtagaatgtgaaaggctcatgtataatgtacttaaggcgtaatgtaggttacattatgacacttgcagaagtaaaacaataacaagaataacaaaaacaataataacaataaacagatacccaaattagtatcttggtaccttatcagaagcattcctgcttgtggaatcagaagatcaaagagtattaagagctatgatatcatccctaccctgtgacacactatttaatctaagaaaccatttaaaaaggggaaaacagcagatattatatggaccaccttctatattattaaaagtctggaaacaatctaaaatgtccaccaatagggagtggttaaataaattacaatatgtgaactggaaggagtattataaagtcattaaaatggtaattagaaagattatgtagccacatggaaaaacatttgctgtgtagtattaagggggtgggggaagctgaatacaaaattgaagctaggccatcaatgcagttatggaaaatgtatgcacatgaattaagacaccaggggaagaggcatgcatgtgaccagctgttctatactggcgtattttttctttgaaacatgtcctttaatttgctatgatgtgtattttctggcctagcgtatgctctccagcctctagggggagctcaaggcttcccctactcaagcctcttctatccaaccccgggaagatagaggaggtctccaggagcctgaggcatagtgaggtacccagggctgggcggccatgggggccttaaagctattatgaacagaacagaactgaagcaaattttccctcggccttttctcctgctcctttctgtgtatagtccttgacccctcttttagaatcagttgctttcttggcgttttcctcttcagtgcatgtacatatttctgttgctactgtccttgtccgctacattaagaaggatctagacagtctttcatctgggatgcaaagatcgctcatagcctacttttttaagaaaagcagaaattattctatatatttatttgcacaagcaaaataataataataaagatatatttttatggtctcataatttctaatttatttttttaaaaaggaagctacctaagtttccatcaatagcatactggttaaataagttaaggtacatctttgtaattaaatactaggaagatattttaaaaataaaacatgcatatggattgataaagttcttcaaaatatagtgttcagaagagagaaaggcaagatgcaaaataacctctctctctctctctgtgtgtgtgtgtgtgtgtgaataaattatccaaatgatcataatgagaaacatttgtctacatatgctagagtggataagtacttaatatgtaataatatgtgagaaaatgataaaaaacagttacctaagtggaataaaaactgagggaatgacacaaacttttgctttttaccccatattatattattttatttattttccctgtgtacatattagttttttattttttttaaaatgggattagggtaggacctaagggtaaggaggctgagataggtgactctgaatcagcagattctttatctcccaaatatatcacagtgagctgggctagaatatgtgtgtgtgtgtgtgtgtgtgtgtgtgtgtgtgtgtgtgtgtgggtgtgtatgtatatgaaatcagatagggatttgggcccaaactagaacatgcacctaccactactagcactattatttatactactactaataaagtaacagcaataaatttaaaacaataaatgtatttaatactgataataaattaatgtaaagcaaaagaaacaagtatttaaggttgaatacttaaactaaaatgtgtaaaatactttactgctttttttaattgtgaaaggagaaatttcacaaacaagtccattttaaccaagttgcattttgaccattacaaaggaaatggaaagtccatttaaagtaggacagggctagtccctgcttgtggtttcatattggcttcctaataaactgtgacccattacaaatgagattgagctggctttgtgctttgaaattttttttctcaaatgtctggtctccttagatttttgagccctgttttgcttttgctgtccatgaggttttgaagttcattgattttgctgttttaaaatattgcttctgaatgggggtgcttggggagtgaggactgactatggaagccaaaggcagagagatgagtgcagagacatttacagtcaaggccagagtcctgatgtggccttgccctaaagctgtgcccagcctaatctcttttccatgtgtagcctcactggggaactgtagcatctcaggctttctgaggaagcagacactacaatgagaacccaaatcctattcttccagcagagctcaatcattagaagaaaatggaatgtggaaagcatgtcacatacctaacagggatgctttgcttaggcagccacagccaaaagagtcacatcttcacatcagtttctctcctgcatgtgtggcccaggagttgctactcaataccacccctggagaagagcatggcatggaaccagagctaatctagggctttcatttctttattgcctgcagattccttccctacccaggcctgagacagagtctgtagggatggaatacagatgtgagggcaagggctcccatatcctggtatacaaagctcagcctgatggtctacataccattactactcagtggttcccagggctccctccatagatgccctgacaaatggtttagtgtagagtgatgaatggtgacattcctgtccactgggttggtgtttgaatctctttggtcaaaaacaaagttggttctagccatataccagaagtcttcatccttcaagatttcttatttggaatttagaccatctcttgtcataaaatttacactattacaaaagaggggttagaaccacagtacaacccagaaaagcagtttgagttaccatattttataaatgcatagctaggcataaactgcaagcctgcaatcaaacagccagcttcagaagctctaataatccctgtggtctagaacaaaatattgaattttaatgttccttctgcaaaaatggggttagtaacatcaaccctctgaaaccactgaggcaattaaatcagtggatgtacgcgaaagtgcttggcctagtgctgggggattgtatttgaagtatacttccctgttgcttccaaaaattcctaatatactgaaatgtcatacatacgtttaactctagctgcttcttaagtcaccaacaaaaagacagtgttaagaacaactttttgtgcttgaaccaatttgccataagtaacatcttgcaagcccccagtgccaactgacttatcactaagctcatcccagatgagactttgcaaatctctatttataaaatgaataccttgctgctaacttatattgggagggaatttcacttgccttcaaataaatatgctgtcagtaattgctgtatttccatttccatcattctgcaagtctctagccaaaaggtcacatgctaacttggtacgtatgtatatatgttgggtagaatacttgctccagatgatactagcactggatcttggggcatttatccgatgtctctgagcctcaattttcttacatgaagaataacagttactatatttactgcaaagttctgttgaaagattaaatcatatgatgcatatacacgcctgggccatatggcaattattactgttgttcttgttatctacgacttcatgagactttattttcagcatcatgaaagatgtgactgactcctacttctgtttgatcattctcctttcccatccataccaaaatgaatagaataataaaattacgaacatttaaggtagatctttaaaccagtgcaatatccaacacagagcattgcatgtagtagaattaatgaacatttgatgacaagttgagtaaataaaacagtccatacacccctcagggttttcagtcttttctagaacatcattaacaagcagtcttcagacctatgtctgaatatccccagcctccagaaacttaaaactacttcaattgcatttatagtgggtttaccaaatgtgtgacttgtgaagccatcttctaaccctacacctacggcagtttacacgcattgataagggcaccaaaacaggatcacagaatccttagctccagctagattaccaaaaaaaaatcagagtactcttcatattagagaagtctgtctttcagtgagtcatcatctatttctttctacttcttttcttgtggccctaaaagccagacagaaatagtctgattgttctcctgcatgaggttgcttcagagagctgcaggcagcttctcagtgtttcagatccaccttcagcaggaaatattcttctgcaaccaccacacacatattccagagatgtgaataagaaataggggagttcttcacaatttgttcatgaagagggaaaaggagaggcctcttggtctctgagctattattaaaataaatatcattggctaaaaggccagaaaaagtttcgggaccacacaggcaactgacacttttccaactctaccatatcatcactaattggatatgctaacactttctgtagcatttcataaaaaatgtttcaagaccaagtgataagatgtctaaacaagcttgtctttggatgcttgctctggttagttctgaggaaatacctacaacaaaatagcaaaggatttttctctcctctagtcccaggtgggtaattttctctccccaccccttctctcagtgtgtgtgtgtgtgtgtgtgtgtgtgtgtgtgtgtgtgtgtctccctgcccctcaatgggaacacagtcagattttgctatacttcagaatcatgaaacctcttgaaatagccatagttcagggctgaagtgtcaaatccagagagcttcacttgaattttccttggattgaacacttccccagagagatacaaaattacaaagatcatgttttgtggatttacttcaggttcagtcagaatgtgttgtaaaaggttaaacttattttttaatagcaacagtacccatctttcagagtccagagacaccctctatttctgcctcaagatttgccttcttgaggcagaaatagagggtgtctctggacttctgaaagatagatactattgctatctgtaggatcatattttcagaaagaagtcatattggctcaaatttgcaaaaacacaataggcattttaatgaaattgctgaagaaaaaataaaaggtgcctacatgttttgtctacatcaaattatgtgctctgctctggaaaactcaggtttcttgcctataaaagagaaaccgtctattgcatttattgtcccatcaacctcatcttacctatctaaggagataaacagccaatgcttacaccttccatagctactcaaagcacttggccttgaaaagttgctgtattcatttcctgtttctgctcctacaaattaatgcaaacttcatggcttaaagcaacataacttgattattttactgctctggaggtcagaagcctgaaatggatctcacatggctaacaccacggtgtcagtagtgctgcatttcttctagaagttttaagggagaattgagtttgttgcctattccagcatctagagatctcctatattccttggcttgagacccctttcttcatcttcaaagccaacagaacagcatctccaggtgctgctgtgtaacctccttcttccacttataaggacccttgagaatatgttggacccactgtgataatccagggaaatctttcatctcaagattcttaatcacctctgcaatgtctctttgaccatgtaagataatatactcagatatattttggggacgggttttggggactgagacatggacaacattgaaggacagcattgctacaaatgctaacgtaagatcatgggctggacctagatttagaaaataaggcaggcagatgaaggagagagagcctttggcactggtgaagaacttgccttttgcctggctccttattttgtcatcatagagtccaagtaaagtggggagaggagtcccatgtctaagatatggaaactgaaattgagagagtttgcatggtatttccgagactcacagttattccaaggagatcaaaatcgaagctctttccatagcactatgcccctggctacaccacaaatattacatggcagatgtgtttagcaaggttttatgatgcagagccagggctctgcacaaatattaacttacagttggtgacttctcacagctaaaggttattcctcaaaggtgaaacttacttcatgaaatagcttttttctttagtgggaagtaagcaaaaacatttttgtatttttggctgagccaaaagaaatgctgtttcgaaagagtaagtagttttcacctgtgcacactatattacatttcagtactttagaggtggtttttaaggaatatccaaaaaaatcaaaaggtaaaacgttttctatatggaaaattattttaaatcttttaaataagaggttagtcaggggtgagagaaggagtgtagagttaaataactggtatcctattccccgtgccttgtgtttctgagccaaattgtattgagttttaaaagaaagagtcttggcatttccacaaaatttgggagaagggaaaaacatctcatagaaatgctgctagaataaatcatacttggagacttctggccagagagagcagccttctccatccaccccaaattaggctaagaggttttctttgaaataaaatggacctttgaaattctgaattattagagtaactcaaactacatatttagaattctgagtaaggccaacaatcatttcaggcttttttttttttcatttttctgttatacaatatggtcttctgcatcattctgggaagaggcgtggtagatgacattttataaaaacttattttgctttaaaagctttacattttgtttcaatgccaaattcaaatttgagcatctgagaaaagcatctcacttctgaaagttattgatgattttacaaataagtcaatatttcactgatttcaataataaggctgaaagtttgattaccacctggcccatttgctacacaacattcagcttattcaaaggccaaatacaaatctcattaataaggaagaatgcatattttaggtgaactattttaggtagaataaacttacgaaagcgttagaaagattaaacctgaggagcttatgatcacaatctataatgggaaggaagaaagagaaattaacattttaaaagtatcttctaatttctcttattatttctgtgatccttacaataatgctttgagatagataaaaataaccctttacctaaagaaagtgaggctaagaaagcttaagtgacttttccaaagacacttttgtaaggagatggtcaactttagaagacctcagcttccaaaaatatcaagagatatttttcactgcccctagcacaaatatattcactctaccctcatcagagatgtgaggttaaaatccatgtaagtacaaaagccttttatcagtttctttacttgttacattggaatattccatttgaatcaggtatgtttccaggctggacgtgaagtgatgtgaaaatacagtgatccgcaggtcacctatgcaagggttcaccactcagctggtagttaaaatgctgtcactctcaaatcttgtttggctttcccacatgtacccatggtttctccaacactctcagatgttccatccctagcatttgaattaatatgttcaaattgattggccatatgtaatgatcaatttagttaatgtcgagaacaccaactaagagattatttctatctggtgccaggtccacctttgtgcatgctgatagaaacaaggaaggtccttctgtagagagaaagtagatcccagaatcagaaaccaggaatgcacattcctacattccttatccttagagatcaatgctatctcttatcatatacatattaaactacaatgcattagtattaggttattatgcataaataaactatatatttttaaattaattacactttttaaaatctctttaagccatattatacatatagacagtgtattaatttgtttgggctgccataacaaaataccagactaagtggcttaaacaataactttttttttttttttaacaattttgggggataaaagtccaagatcaagttaccctcaaggctgacttcttgtgaggccactgtttctggcttataggcaaccatttcacctctgtgtccccacatggcttgtcctctctgcatgtgaagagagagagagagagatctttggtatttcttcctcttcttacaaagctaccagtcctattgggttagggctccacctttatgatttaatttaaccttaattacgtccttaaagaccttaccttcagtcacattgagggttaggacttcaacatacaaattgacaaatttctgggctggcggggggaacaattcgatccatgatagatagatagatagatagatagatagatagatagatagatagatagatagatagatacatagatacatagataactaatccttatttggctagctaggatggatgtcctcctacaaaatttgctccatgacattaactctgttgcctggacattttactttaaagggtacgtgagatgtgactaataacccctatttcttggagttgttatgaagataaataaatgtatttaaattacttttttctggctgattgctactaataattatgattcaggtaaagtatcacctcttccaataaatgtatcttggttcttgcccctgctaaactggaaaaagcaccttttcttgtcttttttattttttttgagacagagtctcactctgtcacccaggctggagtgcagtggtacagtgatgctgttttggcttacttcagcctccacctcccgtgttcaagcaactgtcctgcctcagcctcccgagtagctgggattacagccacgtgccaccatgcccagctacaaagcaccttttctgtgaacccttcctcaatgtttacactacatcatacatcaattatatcattaaactataagctctttgaaagcaggaatagaatgtaattaatctccagctcttcagcaatcgttacaatctctagcacaccatccatattgaatgaataaatgcaaaatacctagtactgtacctagaatgtaatattaatgcaattttatgttcagaaagcactaaaaattcagtaagcattaactactaaaaatattttagttacttaaagttatagaaggtttaaaaatgattaaaacagtgggtgtgatgaatcttatgtttcacttttataatgacttgttatttttgaaattcacagcttggatagtaaaagaaatgagagagtttcagttccagtactttccaggctctaccacaacattgcctaatgcagaattcatttcagacaattctccttttcgagagttttcttgaccacccccccccccaaaaaaagtaaaggttattttttcctattgtcactgcttactagtcttgaaacattaaacattatttttggaaatttaaatgggaggttttggcccacagaggcaatgtccgctgtccagcaggactggctccaggaggtgaggcccatggctgtgtttaaatcagcaatccaagcccagaaatattctcagcaaaggggcagctctgggcataccctcttaacaatctgtgtcttttcatggaaaaatcccctttggatcttatgatatatttattgactttctttccatgtgaagggattccaaatcttccaaaggaatctgatggcctcaaaggatatattcctacctgattttccagaaagttccatagactcactcttaatagatatacccagggagattaggtaactgacaggttccgaatgtagttaagttagcatttttcccagttacaagtctaggatcccatattcagaaaagtttgtaccatttagcaatgagaaaatacacctgctaggttcactgtggaattctacagctttaaagcgcagaaggcggagattcccaatctgggctctaaattggtgtcatccagagagatgtgaaaaatattgataccactccagagattcttatttaattagtctagcagcctgggtatcaagactttaacagctttccaggtgtttctaatctgcagcctagcctaataagctctgctctgaggtctggaactgtgtttttcatccctggataaacactggaatctggggaacatcccaattctcatcccttccatctaagtcagtgattcttatactttatgtcagaatcatctggagggattcttaaatacagattgtgggccccaaccccagagtttgtaatttggtatatatggggtagggcctgggaatttgcattttaacaagtttgcttatggatctgtggttacaggtcctaggacccacttccagaaccactgccaaagatatgatgtatttggttcagggaactttgtcttcctagactgaaaaatatccgaaatctatacctaagtgctattaccaattactcaccctggcattgcaatggagattcgccatgactccagtttgagtagtgccttaaatccctcccccagggctacccagggtagtgtcgtatagtggacagaacacaggacaaacttgctttccactcctgtctgtgccccttagtagcacataactgtaagcacgttgttagccttgggtgatcaatttaccctggtttatgtagacctttaccagtttaagcactgaaagtctcacatccttggaaaccccttagttcagggaaaacctaaaaggttagtcattctttggtgtttccattgttgtttaaccagtggtaagaaaagccaagttgactttgaagagtcccttcaagcatttgagatagtacatgtaaaccaccttgtatagagcagttgcttcataaaaaataatcgtgattatgtctatgacatattttaagatggattgtgtagggaagggaatgacatgtttaatcaccagtatacatttgtagtgaagatcatgcaaagcctttggtttggctaatgcttttagagcagtgggtctcaactttggctgcacatttagatcacctggggagatttcagacaacctcctccaaatacccaaaccacagcccagatgattaaatcagaatatttggtgttgtaactcagacatgagtatttttatgagctccctaggtgatttcaacttgcagccaaagttgagaccttctcaaggtgtggtccctgactggcagcttcaacatgacctgggaacttgctagacatgcacattttcaacactctccccctccctactagtataattgagatctttggggctgaggcccagaaatcagtgtttatcaagttctcccttgcacactacagatcacactttgagtaacactgaaatggcactttctgttgctctactaatgtgcttatatttattattggcaaatgtcctctctttctagcagcactagataaaccttttttatagaattattttaatatactatttggttctattttcaaaatttttacttagaatttttgtatcaatatttaaaagttgttttgacttctagttttgattttgtgcaatctttcccacatcttaatgtctatgatatcctaacttgataaattaattggaaagcttttcttcttattttatgttttgaaccagtttgtataaattaaaattatctgttcctcaaaaatttgtaattcactggtgaaaacacacttggctgtgtcaccgttgttggaagcagatttcttttcacagtttttttgtccataaacattatttctaatgttatttttggccacctatattacctagaagaccatccaccttgaaatctttttttcaaactgttggcttaggaaataatactatgttttcttaaattttttttttaattatttcaatatgtgtgtctatgtctttttccaaacactagaactgaatgtttagtgcatgaatttaagttatgtactaaattttttcgtttatatttaaatacttgaatatatgaatattcctacgagaatagctatggctgacatccataaattttcatgttatatcattatgaatttttgctttttagaaggtgctgtgatagataagcaagatctaaaagttctttgagcaatggaaaataagacatttctttgttttcactgcacaggagatttacatatgaatatacttcatgcttataagtgaatatatgtatatcgacctgcaagaaatcctctttccttgtctattctctaatttttaatgtattttattagtagaaaaatgattagcaaaattcctaacctacaataaaaataaaagaatcctccttttttcaattaaaaaatttaaaacctttgttatttatgttgcagaaatatttgctttttaaattttaattcgcatatgtctgatatattgaaatcaaacatcttgttatttactattttagataaatttttttcaaaatttatgcatgctatttgtagaaaattttacaagttatattagtctgctttcatgctgcttataaagacataccaaagactggagtatttatttaaaaaaagagattttatggactcacagttccacatgccttgggaggcctcacaatcatggcagaaggcaaaggaggggcaaaatcacatcttacatggcatcaggcaagagagcgtgtgcagggaatctgccctttataaaatcatcagaacttgtgagacttactcattatcactaaaacagcatgggaaagacccacacccatgattcaattacttcccatggggtccctcccatgatatgtgggaattatgggagctacaattcacgatgaaatttgattggggacacagccaaaccatatcacaagtatttaaaacaattttttaaaaacaccacggtccccacccgttgataccactactatttgggataaactctacttattcttctgtaatctagttatctctatttgactaacagcgacccaagaaaaattcagaatattaagtaaatttcttatcacatatttttaatcacttcagtgcattttatattatggatgttgacattttaatcctgcacatataatatatattgtttttaatttttaaatattttaaataatgctgcaatgagtgttcttatgtattcatatctgtgtacacacattctcttagaaaaaaagtgtctaaaatggacaatcactgggttaatgaatacaaaacatactgataaattactgtactgaaatatctttattttagctatgcttcttttaaatagcaaagagttgcagttttatattgccccaggttgaaaaacagtaatttgctttgtatatatttttccaaagtacttttttccttttgttgttattggtttctgactttgtttttgttttagtgtttgcccattttgcattttgtttcctttcctttgtgattctgtattgtttgttaattagaccctagacctttttatcatctcataattcagaatatattttatttcaagtatttatacatttaaactgcagcactttgccagctcctagtccatacaaggaccaagacagctgctgccctagttctcaatctggccatgaacttcttgcatcacaatcattttggagcgattattaaaaattcaggttcctaagcccaaccatgaaaccagatgaatcatagacacctagagaatgtggcccaagaacctgcatttttgtaagtatcccaaataaatcttggacacatggaagttttagaatctctaatttcaatttttttttttctggcagaacagacaaagatcacaccgaggaattacagataaaccccattctaatggtaagtagcattttcagtggttctattgtgctccgattacttatctgaattaaaattagatggatacttgggggatggctaaatggaaactctgagcactgtttctttagtggcttttaaggatattctgtgtcttcttaatgaacctctgtgaatgacctcagtcctgaggagaattaggctatttcaaaccaaccactttccttacttttcccaaggactaagtaactattagagcagacattaaaccgtaaccaccaccagctatacccgatgactcaactcaggttataattaggggaaggaaacgccagtgggaggctggtggggctcagaggaaggcagtttgctggaatgaggaatgttccgggtcttcctgcaaaggacagctggcccttctcagcggtcagcactggtcagtgtccacaggcactgctgacatccttaagccacctgggcccttaagtgtccagaaatacctgagtcttagaaggacaaacagaaagacacccagatactacagaatatttttaagctggatgatcgagacttgtcctgtaggtagcatcaaaggggagaagtgatagacccaggatttctagtgtttgaggagattcaggaagaatgaatggtttttggagctaggagtagccctaggataagaagcccccaggtatagcaggaacaattatggagttaaaaattagaaagtgtctaatttctaagacatttcatgttaaataatattaacataacgttaactcatcagaggtgggaagattgggagtttggggtgggggatggtgcaaaagaaaagtcctggaaagtcctcagcaaaatgaaaggcttccatcatctaacctctgctcatttctccagctttaagtccctataagctctctccctatagactctccctataggctctctctctctagaatttttcttgctataggttctctctctagaaggtctctctctataaaaccttcccctatagggtcactccctgtagactgtctcccgataggatctctcgctatatattctctcgttatagactctctccctatagactgtcttcctagatatctctctataaagtctacccctatggagtctctccctgtagactgtctccctagaagctctctcactgtaggctttcttcctagagactctctccctcgaagttttctctctatagggtctctccccataggatctctgccacagccacacttccttaaagtccctgacaacacctgttccctccagcattatactctttgttgtactattccttcaacctaggctattttgtgtttacttaccattgtctctaccctgcttcgaagaccaactctactatgtatggaaggtgcatgaatggacacttccatctagtttggtgaatatcagactcattaacaaaaaagtacacaatgtctcatcattacatatatgtttttgagacccaacaaggattttagttcatatcaagccataaaatccagtttttccttcaatcaaagaggatttcctatcctcaaatactattctaggtttgaataaatttcccatcactttcaggggaatgcagtggaaatacattcccaatgtgagccaccttggacgctgtcatgaggaaagaggcctgtgccttttaagggaggagccaggatggactggggacagtgaacacacagagctgtctgcctggagttggggccaaagcacaggaccttcctttgtaaatgtgtctttatgaatttgtgtcaactgttccctgacccagaatcacccagttaaacaaaccagggattaccaaaaacctcacacaaaaccaaacctgccaggccctttataatccttaagacagtctctacctgtttacattcatttaggctctgataaaatggtactgaaaaagccttccttccaagactctcaggatgcagggattagctcagttttcccttcaaaatgacattttccaaaccatatgagcaaagtttccttttcagtggcccattgaattgcaaaagaaaccaaccaatggtccatgtcactcataagctattctaacctcaaatacttgccccagaaatcatggctggacaaatttgaaatacccaaacctggattaagcctgtaagcttcaattgacttcaattcaagcccagctccttagttttatcatggatgacattacatcactgcattgcaatgaaacatataatcagaaagccagactctactttcctctggggttttggaagagtaattcctttttaggggcaaaaatgtgagctgtgacgaccttctttatattgtaggtcaagtatcaaaccaagcattcatccttttaaagagaggttgccagggaatcaagtcaatgcctcacttgttgacttattctccaccacccaaataactgctcgggcagggtcactttccagaaattatcttggtgagcaaacccctttcttttcccattcaaccttattggaaagctcaggcatgaagagacagacattgagagatcaagtttcagggactgtcaaggtaaataaagcattggaggttgggaatataagaacccagtgcctgggtaacaaggggaatcagaaattaccttcaggacatgcaacctgggaacacagcacaagcctcagattagaatatggacccggagaaacttgtaagcacagtacaatagaactgaagttggaggacacaaagtgagaccgtaattggggaagaatcagatggtctaaggaatgaggtgaaccacaaacagaccctgggagatccaagcttttctggatgtgaatcagccaactccttccagaatcccagctcagggccaaagcaggagtgtgtgcctgggcaggtctgaggccacaggtttgagcatgtagacccatgcacaaggaagacaggactctagggcaggaagccaggctcccaatacaagctcaggcaacaactgctcccttcccaaaatgggcatcataaagccaggtgaaaacctgtcatcccaataatccttcatgattcgcaaggagagaaggtgtttctacaatttagtatgaaaagaatgttttaaaatatgcaaataattccactcacaaacagttaataatttataataatctttatttgctaataatttgaatattatgaactgcagcatactgcaaagcatactgatgctcttctctaagaactatagatgtattcctcttggagttgtattttattttacttcccagaaaaggagccactccattaaaggatgagaaaccggcagctccatgtcagtttttcctgtcaacaggagctagcagaggttttctcatttgtgaatctagtttagtttaggtcaataattagagacatatataatttaggccaggtactgtggagctgctagaaatgtaaggatgagctgacgcattctctggttggcaaatcatagccattggcttgggcaagtcattgttgaacatctgtggcctccattgtacctgccctccctttgagaaaaataggcatctttcctcacattgagacaggagcacattagcaagggaaaatgctgacatgtatttcctacatgccaggctctgtgctaagtgctgtacacatgttaccccacttcaccctcatccctgtgaagcaggttgccttctgtttaccatgtttttgtcactggtgcctaccagacagcctgatccatagaagagtcaagaactatttttgcaataataaatgaatgagtaaaatcatagcatgccaaacttttcctacatgaaattttcagtctccctctaacagtaaaatttaaatactgatttccctattcagaaatgttaggaccagccatggtggctcactcctgtaatcccagcactttgggaggctgaggctggagaatcacttgaagccaggtgttcaagaccagcctggacaacatagcaaaaacccatctctacaaaaaatacaaaatattagctgagtgtggtggcacgtgtttgtaatcccagctactcaggaggctgaggcacaagaatcgcttgaaccttggaggtggaagttgcagtgagcagagatcacatcactgcactccttcctgagcaacagaatgagactctgtctcaccaagaaaaaaaattattttgaaagaaattttagtttggagacagtgaaaatatccaccaaaattttatatacgtgtgtgtgtgtgtgtgtgtgtgtgtgtgtatgcactagacagtaggaacagaagtcctagtcagctttccctctgtcatcaggtaaagaaggcagtgtatgtgaaggattggaagtggaaaacattgtgttgccatctgtcctctctctccgtccaaatacaagctcatttgaactcattagacctaccattcaatccagcaataccattagtgggtatctacccaaaggaaaagaaagatacctgcacccctatgtttattacagcaatattcacaatagcaaagatatggcatcaacctaagtttccatcaatgaataaatgggtaaagaaaatgtggtagatatacatgatggaatactagtcaggcataaaaaagaataaaaatatgtcttctgcagcaacatggctggaattggagggtcattaccttaagtgaaacaaaccaggcctagaaagacagatattgcatgttctcactcataagcagttgctaaaaaaaaaaatgtgttttcatggatgcaaagagtggaatgataaataatggagactcagaagggtgaggaggtgggagggaggaggataggttaatgtagtacaatgtacattatttgggagatggatatcctaaaagccctgacttgaccactacacagtctatgcacgtaacaagatcgcacatgtaccccataaatttgtagaactaaaaaggaaaacaaaacgaaaacacataaagctcattctagtaactgctacctgtttggcactgttctaggaatttcacatactttcagaaaaactagtagttttgtcttccttatatatatcaggaaccagatagatctatgtttcctttttccttgagtccaaaaaaaccatttattccagctgccttatacattaaagaacttctttcgaaaacattggcaggatacatcagaaggggccagtcctcagcccatacaagagtgaaagatgatacatgcctacagcagtgcaccataggaaaatataattactacatgcagggcacagaaaataatagcgtacagtgtgcagatcaatcagtgaaatgaagaggtacctagaagtattgctaggctgtgattaggaatgcagaatttgggggtaacctttgatgaggtaagatcaagaggacatagagcatgtgattgcagctatgttttatgaaatgtaggaattatattttaccctagatctcaaaacatacataaatcaaccgcagggctttcttgaacaaggtagagcccacagcctctctatgttcccatcttccagctagcggatagcaatagctaagtttaagtaataggagtgttctagtagagtttcctggaagccaaacctggagaatatgcagtttatataatttttttaaatggatattcaaggaatctcttatttgaacagtttaatcaaatgtcttatcttccacagaaattgatgtttgtaattcttacacaccatcaagagaataactcatcaatgtgttggctgagtaattcaaattataatataattcacttatatgttaacaactgttagatgccaggcactgttctagatgctttgcatgcattggggtaagctaatgactctgaatttcttacatgttgagttcgaagtacctgcggatttccagataaagattaatttgctattttagcacacactaattgtgaacctaaaatgagccaggcactattctaggcactggagaaaaagaggtaaaaagaataaaaagagatggttcctgtactgtaaaaacatacagtctagtaggaaagagagacccaaaactaattgtaataacatggggtaagctacactataataataaaaatgacaatggtgataacaattataaatgatgtaatttatttagcacttactctaagatagacattttatgtgaatgagttcattaaatactgttaaaaactctgtgacgtccatattcatatttccaaatgtataaatggagaaactgaggcttagataaaataagcaacgccacaaaatccctactgatcagtaacggaacttggatccatttgaccccaaggcttgtgctccctattgccatcctatattaccccaccattcccacccccttttgattttccagagttatgaatgcagtacaattaaggtgcagaggatctgggagccagacgagtaggaatagaaaggcttcataggagggcaaaatctgaatcaagccttaaaaaaataacttggcatttgtgtttgctaagctgtgaaagatgggtacaggttgcaatgaaatagtacggtaaagatttgggatcaaaaaaaaaaagtctgcttcgtttaagaaacagggattagcgcagatggaatatagggtatgttgaaagaaatgagagagatgtgactagagaaacacatcagaaccatgtcaccattgtcgcagaggaccagctgcgttaaagacctgtgattttatttcatagagatgatccattggctcttttttttttctttctttcttttttctttttgagacggagtttcgctcttgtcgcccaggctagagtgcaatggcgcgatctcggctcactgcaacctccgcctcccgagttcaagtgattctcctgcctcagcctcccacgtagctgagattacaggcatgaaccaccaccacacccggctaattttgtatttttagtagagactgggtttctccctgttggttaggttggtctggaactccagacctcaggtgatcctcccgcctcctcctcccagagtgctgggattacaagcgtgagccaccgcgcctggccgaaccattggctctttctaagcagtggaataacaatggttcataacatttagaagatggggttatacactcaccagatctatttccctagagcctatttcagtatctgatacagggtagattttaataactgttgtcaactaataaatatatatttttaaatacattgtcagcaatgtggaagatacactgaagaaggaaaagactagtggcaagatataagccaggtggtaaaatctaaaagaaaagtcagtgatagaaaagaagtttgctgagaatgatggtttccagcttcatccatgtcccatgtatacatatgtaacaaaccagtacattgtgcacatgtagcctagaacttaaagtataataaataaatatgtgtgtgtgtgtatatatatatatacacacacacacacacaaagaagttgatatgggagagacatttgaggtagaattgacaggtcttggagacagcatgactgtgtggtctcagagagagacactagttgagaacaactcccaaaattcctatttgtgtgtgatcctccatgggggatacagaagggggagtctagtcggggattttgagttccagttgcctttggaacatgactgcacagatcgcggcctgaaaggaagtggcagagaagaaaaattcaaaatggctgccaatagtttgccctctggaggcctcagagttccgggggccatggatgcatggccacgcagggtgagcaattgtgatgagagaacagaaaggaaatccaaataagagaactcaaagcagagatgagctaaaaatcagcaacacgaaccatcacaagtgggtagttacgctcggcaggagatccaggcaaagcgagggcaaacttcttagccttttcctgtggaaaatttataaagctcagattggagaaaacgtactgatagttttgaagctggcattttaagttggaatgtcttctcaaagtagcacataacggcacaattcaataactctgaccattgtggaaaaatgccatgtgccaacagcgattttccataattttgttcagaaaatctgaaagaaatgcaaaaaatggatttgcagccctggcagcaggcagagaaacagtagcagagggctgcaggccagtaattgatgtttcaaatatcactgagtgctttgcctgtaatttcaggggagaatgataataattaaaagcacaaacttacaagtcatttctgaggaggaaaatgctgaatgcacttaaagtgaagggggtttgttgaaatgcttaagtttttccagcgagctttcagatatgcaatgattagttttatgttcacagagtgactttctcctcaaatgttccaaagtgccacaaaatggaatagattattaacccatgagattccctgggagccagtgatgaaactataaccatatgacattcccacatgttcagaccttacttgattgtaccggcctttgttacaaacagcacagtacactgtttaaaaggatgaaatgaaacctttcctccttctcccaactgacttggggctttactacgaggcagatttgagcttgagtctgcatccaccctttttagtgctgtgaccttaggcaggtcactctattcctctccacttccattttttcatctgaaaaatagatagaacaatagcacttaacatctcatagggtgaatattgaggattacctgagagtaaaacaatcaatataatttcccacttataatctacgctcaataaatattagctattattgatattattattactgctaaaatgacaaaggcacactatttttataattatttatttttgctgacagaatgtaaatttggccacagattgtctaaattttcctgatattttaaaacaaacaaacaaacaaaccagccagagattcaactgagcagcataaccctttcctgaaaggaatcccccatggttaaacaaattcagggactgagttttccatatcccagaccctattacccattgtattacaggccctggcatgcagtgagcactctataaatgtggagcacatatattgctgaatgggtaaacagttttatccctcctgagaagtaaggacctctggtccctcaccactttctgatgactaatattatgcttgtgcccacacaagttagctgtgacatctggatttttttcacgtgcaaactctctcctttccaagcactgaccaggagtgactttctgcagcttgggttgacagatgagataactagctttgtcttttcagacaaagctgtgggttgacagggatattgtaattaacaagtaaagtgaacacactaagcacatgctgcgattgtaatgcccaccattagcactgcactaaatagagtcgttttgtatttttcttcagtaccatccacctcttactggcctatcagagtgaattttgttctctggaccatgttgattcattcacttaggttttcacagatgtgaccttacctgttggctcatgattctgaatgtagactagtgaccagtgggagaggcaggacttttttacttttgtttttcctgctcaaaacaggatcttttatgtccccagaaagtaatttacacaagatagacctactatataaacagagagaaatgtaagttaggctggtggcttgtgtcagcctgaaaggtgatactgccttaaccagcatgacttggaggcagaacggggggagtcatgatgaagttgtgatgctgcttctcagctcctcctaaataatatgttggtaatgtggtcacacatggctttttgttcaagacacacctctacccaaatgcaagactaaagtctctcaaagaacctatggcattttgctaatcaaaaactctagatatggagttgggggaaaagggctgcattttatccctggaaactgcaacatgagtaactgaggttcactggaataaacagcacattcaaggaagttaaagacctgccaagaaacagtgaggcaagataagaaagaggtaccagacaatcttgttgatttcaatttgcaagcaataaccaatagattatttatttccagttgaattttccaagccaaattcagttacatcgtaatcataatttgtgtaaaaatgaaggttgactaaccacctacgatgagaagttaagaattaagaatggcaatgtatttatttggaaaaaataaaatacagagcagagctgcaagaaaactctcagaaaggtgggactccctggttggtctaccttggtgacttggtttaccccaggaacactcaaattagattcacattcctgggccaaggggtcaggtgtttccagttaagagtcaggatccttgaggtcttctgtagacatctcctttaaatggatgaccttaggagagggatttatccaaatctccatttgttaaagttatggggtttaaactactctcgactctgaaagacatatactaatggaaggaagggaataaagtacaacttagatagagttgcccaaacctggttgatatcagagtaacctgcacacattatttaaacagattatgagaactcactcaagaccaaatgggtacaaatctctgaaggaagggcttaggaatctgtatatttataaaagtaattctgacatgtggccagcctgctgtcagattggtatctgggaaaacattgattccctctggttctctctccaataaccaccaatcgattcctagaactatatgttagtttacatttccctgaatgttatataaatagaatcatatagcacatacattgtctagcttttttcacgatacatatttattttgacacctatctgtgttatatagaatgtattagtagttcattctttttattactaagtagtattccaccttatggattccagtttgtttatccacttatttcttgatgcacatattgttttttctcatatttaaactactacaaataaagcttctatgaatatttgcatacaagtctttgtataaacctatgctttcatttttcttggacaaataggagtggtatggcagaatcatgtagtggatgtatatttaacttaagaaccactgtgctattctccaaaatggttatactcgtctttatttcctctagcagtgtatgaaagttctagtccttccacgttatcaccagcacatatatagcagccttagaaacatcttacatggcaggatgaggagcaagtgagagacaagagagaagggttacacacttttaacaaccagatctcctaagaactcactcactgtcatgagaacagcaccaaggggatggtacaaaacccttcaggagaaatccaccaacatgatccaatcacctcccaccagacccctcctctgggggattacattcaaatgagatttgggtggggacacagattcaaaccatatcaggtttcatatataggtctataatcaattttgagggttttttttatatatggcatgaggtatgagtaaaatgttattgttttgtatataaacattcaatagttgcaatatcacttgctgaaaatactatcttatctccactaaattgcctttgcacattttccaaaagtaaattgtccatctttgtatggtctatttctggctctctaatcagtactattgatttatttatcagtctttacaccactgctacactgtgttgactattgtagcttcataatatatcttaaaagcatatggtattagtgcttcaactttattctttttctgagttgtcttgaatattttaggtgcttagcacctctgaatgaattttagaatcagtttgtcaatttttacaaaatgatccttcttgggattttattaggattccataaaatctattgctcaatttgggaagaatcaacatctcaacagtattgagacttctgacatatgaacacaatatgttactattttttgtcagatttagcccatgtatcttatatgttgaaggtgactattgatattattttatttatttatttctaattgtttctagtatatagacatacaattgattctgacattgttcttgtttcctacaatcttgctgaactaatttattggttcaagttactttctgtagataggattttcaacataatcatggtaattgtgaataaaaacaattttacttattcttttcaaatgactctgtttggaatttttaaatgtatcttcatgagggatattggtctgcagtttccacctcttgtactgtagttttcaagtatcagagtcacgctgcttcatagcataatttgggaaatgttctctccctttaaatgtgatgaaaaagtttgcatagaattggtattgtttctttctcaaatatttggcagaattcaccagtaataccattgtggtctagagttttctttgtgaggattttaactacaatttaaataactttactaactatagggataatttgggttatctatttatgaatgactttaataatatgtgttcttcaaagaatttctacatttattgtaatttttcaaatttactagcagaggattgttcacaatatttccttatcatccttttaatatcagtagaatcttcagcaagttcatctttcttattttttatattggcaatgaaagtcttcaatattttcttctggttactctggctagaattttataaattttactgatcatatctaagaatcaaggtttgtttccaatgatatttttctattgtttttctatgctctattttgttaatttctgctatcatatttatgcgtttacttgtttatttattcatctatttattctacatttaaatcttcatttgccattttcttaggttgaaagctggagtattgatttgatatctttcttcttttctaatataggcatttaattctattaattccccccaggtatttccgttgtggcattccaaaaaattgtgatatgttgtgttttcattttcattaagtttgaaacacaatttaatttccttttgatttcttctgtcagcttttttagaagtgtgtaattttatctacaaatatttggagattctttaaaaatccttctgttaccgattttagtttacttccattgtgttctgagaacacactttttatgacctaaatcctttaactgtattaagacttgttttggcataggatatgttctatcttgttgcatattctgaatgcccttaaaaagaatgtgcattatgctactgttgagtagagtgctctataaatatctattaggtcaagtggcttgatagtgttgttgaagtcttctacatacttactaatttcctatctattttattatatcaatttctgagagagtagtattaaaatccccaactatcaatgtcaacttacgaatctctcatttatgtccttgattagtttttatttcatgtgttttgaagctatgtttaagggcataaacatttagaatcatattctgttgataattcagccactatattgttataaaatgaacagtttgtttctgttaatattcttagttctgaaatctactttgatacaaatacagccattccaggtttctttttattagtgttaacatgttaacactaataaataataacacgttatatctcattccatcctttttattttaaatatttgtctttatatttaaagtatatttctttgtaagtagattacagtgggttctttttgtctatccaatgtgaaaactaccttttaattgggatatttaaacgatttaaatttaatttgattattaatatgactaggttcaaaactattgttgttttatagttgtttcatatcctctttcttttgtccactttttctactttctttgaatgaattgaatgttttttattattttcttttctctcttttattggattaccattagctacaactttattattacttttgctatttagtggtttcattagagattatggtatacatcttttaacatatcacagtctactttcaagtgatatcatatcactgcatgtatgatatgagtcttataagagtacatctaaatttctcttctcatgttctctagaatattgctataacacactttacatctacatatgtgtgtgtgtgtgtgtatatatatatatatatatatatatatatatatacacaccccaaatacaatctttttatttttgtttaaacaatcaattatcttttaatagttcaagttttaagaaaaaaactctatctatctatacaagttatatttgggtctttttaaatatcttccatatctcctcttaggtttttgaacatctggaatacagttatagtaactgttttgctgccatttctctgctaatactagcattttgtcagttctgggttggtttctaataagtttattttctcattttgttcttgctctttgaatgcttgataatttttgaatgaatgccaggaattgtgtgttttatgttgctgaatgctagatgttttttgtattctcataaatgttcttgaactttgctctggggtgctttaagttacttggaaattatttaatctttgagggtatggtttttaatatatattatatgggaccacagcagtgttcactgtagtgataactactctccaccactgagacaagacatttctgtggactctgccaaatgcctcatgaatcttgaggtttctggtcgggctgctaagaatagtcaacactatcagctttctaatccctttcggtggttcttttcctgacctcaggtagtttacacacacacacacacattcatctgtactcagtttaatatctgagggatgcctttttagatctctggagtgcttactctcttaacagctctttcttctctgatattctagccctcttgacctccctggattctctgctccatgtcctcttctcagggagcccaccaccctctgtctgggttcttccttcttatgtatggccttggatatctctgatggcagtaagctgaaacaatttgaaggatctcatccctcagagatcactgcccttcactgttggatgtccagtgtcttgcaaattattggattatataatctatatagtttttaaaatgtatttactattgactgtttcaggtaaaagaataaatccagtccctgttactccatcttagctgaacgtgaaaatataaagaattatttttatccccatttcacagagaagactaaagaccaaagtagactggttttccccaaggccacatgttgccaggtgtggtggctcacgcctgtaatctcagcactctgggaggctgaggcagggagatcacctgaggtcaggagtttgagaccagcctggccaacatggtgaaaccccgtctctactaaaaataaaaaaattagctgagtaatatggcaggcacctgtaaccccaggtacttagctggctgaggcaggaaaattgcttgaacccaggaggtggaggttgcagtgagcagagatcacaccactgtgctccagcctggatgacagaaggagactctgtctcaaaaaaaaaaaaaaaaaaaaaaaaaaaaagaaaagaaactcacaggagtgcactactgtatacatgtttgtttctatttttgtccttctagacattaaaaagtcagaattttccttctctagtttcttgggactttgctctggatgtacaaattaggcaactctttaggaagctaatggtccatctggtctccatttagaaagttgatgtggagtgtttctttttttgccagtcaagtttctagaactacccatcttaaaaatctttctttactggtcatttttcatagtggccacccaatttgtttctctaaatgagattcccatatttgtgctttatatctgcctatcctcattcaacaattttatagttcaaactcatctttttatttacccatatccctggaactacacaaactgacttctgccagcatactttcatatgagtcacctcctagttgctcactatcaatgttaacatacgaaaccggagttacattatcattttccccactctagtcacattgtgttacagtcaaattcacatgtaattttatttttgggtttccattgcatctgtctctggccttgaccttagaaggaaaaataattcttgatatttcatgtgtatttggtgcctgctgtgtcttttaataaaatttggagaagagtgaggagtagagattaaataaaggcagagacatcttctttggacgagagtgttcaatgttaagaaaaagacaaaacaaaacaaaacaaaaaaaacaaaaaacaagatacaagatccaagcatcaggggttaaagatttctacagtgaacaaaggcacctttggtaaatgatctcatttagcaaccatgactagggaatcacaccttgacttcacacttctctccttgcattcactgggacactgggccatgtatttattatgtccccagagaacaaagacttacatacaaaactgcaaacaactcagcaaagttgctaaaaataattatatttcagtagatgattctaagaaaggagggagaaaaatgtacttagcaaaaccagaaatctccagtagacactggagtagaactgaacaaaatcttatataaaaatagcatttgggtcccatctgaatttagtgataaggactgtaacaatacaatacaaatgtacctcgtgcagcatttgtcatctgactctggctctcggacactttatagcattagataatgcagttacatgggagatctaatagcagaggaacaggaaaattaaaagatttaaagtcaggtaggcatagtagtatgtcaaataaatttacaagagaattggtacactgacaaggcccagatgaatcaaaaattcatgtaagaaagagattattttaggatgacaagagctaggtccaaagagtgtcagaaagaagcaggaacaggaagaaagatgcagataccacacctatgcgtggaccattctctaatcacttcatgcaccccatcacattttgtctctacagatctctctgatacacacatcatcatcttaaccttacacaggcaaaaaaaattgatggtcagggagtgaatgcaaatttcccaaaagtcaaataacaagtgccagaggcaggatgcaagccaaatcttctaactgatggttctcaaattttagtgctcatgcggacacgtgcatgtacacacagacagaaacacacatctcctggggaggttcttaaaaactgcacatttccaggcacccctccccaaatattttgactcagtggatctgggataggagtctgtaagaggatcaagggatctgagggctgatgagggaaaaaatatgaccatgagaggcagtaacatacaagtttttttggtggcacttgcccaggatcacatgacaggggaagtgcctcatagcactagactatcagaggcttatagggaaggggccatcacccagaagagaaggagggacagggaactacctgaagaggggatatcagagaggggcttacgtgtctaagttgtgtcactcagcagcacagcggtgagcctctgggacagaaaaccaaaaggcaataatgggttgggggtccttgtaattactaggccccattttatcaaggtgtgagcaattgcatgagttttcttgggtcatgcaaagcaggtaggctctaaatagcttttaaaaatctacttgtttgggctttaaaaaataattagatgtgtaaaactcttgggtttggcactgtcaggcttttgaactcatttatatgacagagtgggaccacattcgaggagataactctgttgtggtatgttccagccacattttaaggaagaaaataatatttcaaactccaagtgctgggctctcttcattgtagcccagccaactcaaacagtggataagtatgccaggagtcagtgtccgtgtgagcacatgctggccaggcctcgggatctgggttaggatcgcaaacatgttttcttcatcttcatgaggacaaattctttttatacaagctggacttcttcaatcattctttatgaacaaagggagaacaggaaagctctgtttaatgaacttcccaatccagttaggagtaaaaagtagaatacacaccacatttggagcactttatgttaggattccgcccaaaatataccatagttgcatgaaaccgtaagctcactggtagctggaactgggtttgttggagggaccatcataatcactgcctctaaagcaaggcctttccaatgacagtagtgagtaaatgagcatggactaaataaagaacacaggaacatctaagttaccgggctctacatattcaagttgttgtgctgagaaatctgtctggagccatgaacttcaatcagttctcccatcgtccctgccagatgggacttcagtttctgtcctcaccacaaggctgagtcacaaacccaggctgacactgggaatgtggcatttaaactggtgcttaccaagcttataagagtttctttgagtgacccgggagaaggggatggtaagacaaagaaaaccactgattggaaaagggggcatgaggagtccagtcctcaattctcgtacaggtgggggtaaagagggaaattcaagcattcccttagtattttgcttccacctccctgttcccacctcattctttgtaactcaaatcagaacctcctctctctaaaatctgttccctggtacctaggaatcacaggataggaggctatttttttttatcttgacacaaaatttgccacctccaacctcaaactgctcaacccacagctccctccaagcccacccaggttttaaaatgtgctccaagtctcagcattgtggtcagacagtgcagcacctgctgctgagtttagggttctactcatctccagccctacccacctcctacccatgaaagagaaatataagagttctaattgcagttgctaatattgtgtttcataataaaaatgaaaacataatttatttttaaaggatgacctgcaaattttgcttcccttttcctcaatttgcccttgtgcaaaaaccgtggtttgttgctgtcctagttaactccttactgctagagacaggccctatctttcatggtaacacacacataggtaattttttttttttttttttttttttttttttttttttttttttttttttttttttttgagacggggtgttgctctgtcgcccaggctggagtgcagtggtgcgatctgggctcactgcaagctccgcctctctggtttgcgccattctcccgcctcagcctccccagtagctgggactttaggcgcccgccactgcgcccggctaattttttgtgtttttagtagagacggggtttcacgtgttagccaggatggtctcgatctcctgacctcgtgatccgcccgcctcggcctcccaaagtgctgggataacaggcgtaagccaccgcgcccggccacacatagataattttaagaccatgtggatgctctctattcctcatgcaacccatggaaacattgctaatgtgcttctttctaccacgttgcccttcctgtctccctctatcctctggataattcctggtcatccttttaacattacttcctaaacctgtttttccaaatgtggtccatgctctagcatcacgagcatctcttgaaagtatattaagaaacagaatctaaggcattactcccctgctcctgaataagagtcttcattttaaataagtctcagggggcttcatgtgcatgttagagttttagaagcatagccctagaagatatctttctagaaggagtcacacttattttctggcttccatttccttgttcatgcttcttattctattataatgactctaggaaactccttttctagagcaaaggttttctaattgcacctaataaattgtactcactgaaaatcataacagggtagtgaggtcaatttagtgggtcataaccaggtcttttaattaaataaaataaaataaaccactctagaatagaatggaaaatatcaccaggcaagtatagtttcatataactttgaaacagtatgtctatgtgtgtgtccatgtatactggattgtctacatatatttactgtggaccatgattataaaaacttgaaaccctctctaagctccttggactgagggactgtttgactcatttgttgtacatgtaacccctaacacagtgattatagagtagatgctcaaaatgtatggaatgctgtatgaaaggccatagatcattgggagtggcatcaatcattagtgaacatgacatccagtgagaggatgactgacagcagaagggaagaaagtggctggcctagcctggggagtaggagggaaagaggaagggcttaacagatctgagtccctttcttgaggcagacctgtgttcagcacctggatgggattcatgctaaccagatcatgtgccctttctaaaataaaaattttatatatttaaagtatataacatcatgttttgatatgcatacaatagtgaaacaaattacatatataagatatacatatatacatatataagatatacaaattaaatatataacagatacataaatgtatttatacagtcaaacaaattaacatattcattcctcaagtagtgaccattgtgtgtgaatggcaagaaccagccaatatctctgatgaatatcctcaaatgttaccaaactgaattcagtaatacataaaaaaaattatacaccatgaccaagtgggatttatccctaagattcaatgttggtttcacatatgcaaaccaatcaatgtgatgcaccatattaaaaaagaaatgaaagataaaaaccactggccaggcatggtagctcacgcctgtaatctcagcactttgggaggctgaggcgggcaggtcacctcaggtcaggagctcgagaccagcctgaccaacatggtgaaaccccatctctactaaaaatacaaaaacttagccaggcatggtggtgtgcacctgtagtcccagctactcaggaggctgagacacgagaatcgcttgaacctgggaggcggaggttgcaattagccgagatcctgccactgcactccagcctgggcgacagagtgagactctgtctaaataaaaacaaaaaaacacccacacacaggatgctcttaatagatggaggtcaaatgccttttaaggaacctcagacttcatctggctgtgcaaatacccctaggaatgtcactaggcacggtagagaatggccactggcttgaaaaatactgaccaaaagtagaatttcaatatgtgagaaggaaattaagaattgtgtggggaagattcaggtttgaatcccaggtagaatcttacattgtaagatggcaaaagaaaggtcagtgaaagactttctggaaaccagaatcagatatccgtccatgcactccatagtcattgatgtaacatctactacgtgcagatactattctgaagactggcaatttaggtgtgaacaaaatagacaaaatggctcttctcatggaatgggcattgtagtgaagaaagcaaagaaaaaacaagcaaatatttcatatttgtatttatctttatattatgtttatattatactatcccaaatcctgcattttgtttatattatatatatatatatataaatatatatgtaacatgtaaatatataacatggtgatttcaggtggtcatgctagaagaactgatggaaagtgagagacagtagcacatagacccctctcttagctcccttatctgtgagctaggaaagattaggatgagatgagagccaccccaagaggaaaatatctaagattgattcagattttattaacaaggtttcactttatgttgaaatctggtaatctgttatcagagattagcactgcaatgctgtagaatggtcgagtccagtggcattaaaactttgttctgtgtagcctaagacatcacaactggtgagtgaggacaggccggagagactctggctgccttaccacaacctgtccctctagcacattgcgacttaccatcagctgcatttggggagatgccacgggaagctgtgttttgcaaagttgtcctgctccagaatagctctaatggaattctctaacaactttagctttcagattaagaaactgagatttatcagaattagctgacttgatcaagagcgcacgttgaagaaaagctaagcatagaattatgaatcatgcctgcttttcctgatctcagtcaattataaaacaacagccattctaagatttcttactacagataaaagtgttccaggccttgtttcccttagtaggcaggagagtgtgactcaggccaaggctcatttgccccatttgacattggcattacaattccttacctggcaatggaacctacacatacctcactaggagactttctcacgagggaaaaccaatagggacttaactcattggagttaactcttaagtccaagataggatatcgcatctatcctaccttgatacatcccctctgctctgaatcctggtcagttaaaatcctggcatatgttgttattttgttcgcttgctcaaagggtttccaaacttttgaacaccatgtgttcattcaaatgtactgctttggactcctccttcactctgatttcagccacctagatgatttttattatctctttactctgccacctccaaggaaaaattttccttctttgtgttcaaagtcatccagatgtcagtactttctctaatggactttgccttcgtccatccccaagtctcatacacaaaaagccatgtacacatttgcgtgtaccagccttggtaggtatcatctagttggaagcagctcagcaggaaatatccccaggcttccctcaggctgctttttttttctcctttgggggtacctaatttccattggtcctttgtttattggcctctgggtcatccactattaccaacttgaattgagacaatctgctgtgtaaagggtctaatccttgtctttgcatttactcttttttttccccatctaagtatttgaatacataggaacagatggaactgtttttagacacagttgcagaatttttccttgcagacacgcatctacacattctggtaaactagttgggtaacctgcttaacccattaaaagcctctctgacagccattttccaactgatccagagctaagatgattatagtaaggtctgtcccatgtgcacagagttttcttactttctcaaacaaagcattttagttgaagctgttccactggcttttctaatgccagcccacaggaaagtttctcccaaccactatccataaattctatgcaaccacaccagagatggcagctgcccatttcacagccactcaagctaaatctctccttaattcttgtctccaaatattgtcctcagttcttctggggttggagctagaaacatcacacatccccaaggcagcaacaacattcgtgtttactttagaatacattttgataagcacccaagtgcttcagcggaaactgaagggtatttgtgtgaggtagcagattgtggggaggttttatgtcccagcacactctggggaaaataaaagaaaatagctttctttcctggaagaaaagaaaaataaaaagaaaataaaaaagactaagagccagtgcagacacaaaaagacaagctaagggaaccccaacaacacaaattctggaaagaatggcacctcccctgtcccccacaaaaggctcagactccagaaaaactgtgctgatgatgttggaaaagcttatcgtgttattgggaactaacttccctttttctgtaggaggcaaaacccaagaagtgtaaacgcaaaaagtttctgcgcttctgagtggagaaagttccccaaaatgagtgtgaaaagactaggaacaactgaaaattccagcccacagtttcaagctttccaaagcctgtttgctttggccagcctttgccattcctttctctcttttttcagaagtgtgaaatgggttggttgctggtatttgttctgtggtctctgctaactcttccatctgtataaacttagctctgccaatccagcagtttagcagcactttctcttcagctagctcaaaaggacacgaaggtcctattaagtggccctttcaagacttgcaaataactgtaccatgctgtctgattgaaggcatgaagcttatttatgctgtccttgcaagggctggccttccttttaagacttgtagctaaacaggatgaaggcaaagttaatccaagtctggatttgaccattcctccccagtgtcagggaagcagccgaggtggctataatatgcctataagcctgagaaactaggcccggcacagtggctcatgcctgtaatcccagcactttgggaggcctaggcgggtagatcacttgaggtcaggagttcgagaccagtctggccaacatggcgaaaccccatctaatacaaaaattagctggccatggtagcgcacctgtaatcccagttactctggaggctgaggcatgagaatcgcttgaacccgggaggtggaggttgcagtgagccaagatttcaccactgcattccagcctaggcgacaaagtgagtctttgtcaaaaacaaaaacaaaaacaaaaaaacaaaacaaaaacaaacaaacaaaatcttagaaacttgaagatagggcatggtacttagtggtgatgtcttcctctttttcatgaacatatttatttgaggatgaagagagccatgggagaatctacattcccatgttttcccactttccttctatatttatctgtatttgggttgaccctcttcagcaagctactgtccttcaagaagcaataggctaacagggtgcccacatgcttttatctattctcaatggaacaacctagactatttaattaactgtttttcactagttgctcttacaaagcaaaatattgtcaaatatgaaaatttgccttgggtcagagaccgaatatgagtagagctgacggtttttgccaagtccaacaagtatctctgtgaagtgtaaacagctattaatgaagagagtagccacggttaaataaaccagggggtggagaacacatgggccaagagaagagctatttgttgcacatttcctctgtctaaggatgaatccagcctagttgggtcctcagtggaaggtaacagaaattttaaaatggaccagaataaatagccacaaagaagaaatggtgccccactgagaactagagccccattgtccaccatggcattaaaaaagaccccagttatgtcagatttaaagtcatgagctcttcactgggttctccaagctagagatggcaaaactttaacccagagcttcgtggagaaatttgtctttagtgactatacagtcagagtctatacagtcagtgagtatacagtcagattcattagcctactttatgcagatgtgaatctttctagacctgtctcctccttatatttctgatctagataattcgttaatctgctcaaaaccgagcaaggctggattccacaaaactttttccaaagttttgaaaactttttccatccatacaagtgggcaggtaataaacatagttcccaggattgtgttaagtaaaatgacatttatagaatgcacaatgaaatattaggaagaaagtaagtcctcaaataataactaaaaaaaaaaaatttaaaggctatgggcttacagtgatctggacccaatgcaatgctacaagaaataaaaaagtatatatttgtatttttaaggccaacctaatactgtatcagtaattccaaagaggcagacagaacctgtaaacacaaagaggaacgtccttttcttgggaaagctctccacaccaaaaaccttttcttgtcaaatgaagggtacagatacctaggaagtatttacatttgggagttcatgtagtggaaatttaccttgacaaagtcaggacaatgggaatcattgggaaacactcccaaaaggccaaaagaagcttataacatatgcttcaaaggacatacagttactttttcaaagggccatcagcttttgattctctctggctaattgaactctggactgctggaggaaagagattatgtatcccggtgtctggaataattaatagtgcatagttaatgcttaataaatcaggtccatgacttggattcaaatcttcactctgccactttctgcctgtggtactttagcctctcagagcctgaaattcctcttccattaagcagggagcttaatggaacaagcgccaatcttgtacggtgttatgagaattaaatgactctgagtgttgcatgcttagaggactgcctgacataaaggagtaatctgtaaataatatctagtattattattgtcgttaaagcataatcgtttggttagttatcactgaccactcactcttctctttcttgctaacagaactataacttgtcaaaatcaaatatgaaaattctatctccctttgattgagattaagtctggtatgtgactcagttctggtcaatgacatataagtacagtatctatttataaggtgctttctggtgaagccatcttgtaaagatttttctcgctgaagggagactatatattctatattctcatgacgatgtgatgaccagagctgcactaacctcttaaaaccattgtcaacaatgtttggcagagtaaagtataaaaagagcataggtaacatgagacttgatggcatcatgggactgctgcagcaacccatgcacaatccatctcctgccatctaattatatgagctccaagtctgttgcttccagcagaatgcaaggtaactgatacaatccttttgtgtgtagagtgtgtatccacataaatctacacacatacatgtgtgtgtagtgacatgcaaatgtctacaaggacatatactgtccttttattgtttaaagttttatatttaaattttaaagaattcaaatattgacagatgtacagcaaattatatcatagtcacctatgtacttgctactaatattaaacagatattaatattttgcttcatttgctttagaaatctatctgtccatctgtctcatttatgaaatgaaacattaccagttaagataacgtatctgcaaccatcccttcccttaggaaaacattactgtgaagtaagtctatatacttttgtagttctactacatgtaggcacctatagaaaaacatgcgtttgtatgttttataattttatagaactggtgacttgctgcatatatcatttttgaaacattactatgcactgagtttgatcatgtatccatgtttatataactgctttgttcattgaaactgctgcatagtactccatctgtatggaaaaaaatcttcagacaatatttcttttattgaggaatatctatttgttttgacattttttatttcaattttgttctttttttgttaatgtctcgaaactcatcatatattctagtttctactttgttgtcagttacatggcttgcaaatagctactcctagtccatagcatgacttttcagtttatgatggcttttctcttgccaatttttttataatttaattatatttattagccttttccttgttggtttggaaatttttcctttaagaatttcttcctatcctaatttggaaagaatttttaaatgttttcttctaaaatggtaaaagccttctttttacttttatatgtttaaaccctggagaatttattttttgtaagataaatactaggcatctgactttgtatttttccatatgaataatctaacatctcagggccatgagcgggatgtcccttttttcacagttgatttgctttgtcacctctttcacataccaagctcctacatacacgggggtctacgtggtagtcattagcgctcgtcacaaaatgtttctatttcctcatcttgtaggtacatggtaaatgtccattttctgacccttttgtgcacagtggggccatgtgttctgcataatgtgttatgaacaaaagtgcacatttaattgccagtaggaatccctccagagatctccttctctctgttagtgagagatgttacttgagcatcagcctggatacccaagtgagtaaaatgagcagagtccctctaacaactttcatggacttgcagcacagggaaaaaataaacatgtttattttacacttcagagatgtggaactgtttattactacggcatgacctggccccgtctgactgatacagagaaactggtacactcatgggaaaaacaaccaccaaacatggcatcggctaaagagctggcaccaggtgggagggagcaagaaattaggttgtcatataaactggagggatattgatctgttatccaaatgtgaaacatttggcaaaagttatccctgaaatagcttggaactcagaaatgtatttaatgaacttttagctcaaagagaagaatttggaaaatagaatgtaaaacaagtgtgttggttaacactggctttatttaacagagtgctgcaagaaagagatgggctcagaaaaggaccgactggattgcaaacaggaataaaagcctcaaagagagtccgtaagtataaggacttgcagcattgaaagaaacaactgcttctcattcacatctaataaaagatactggccagtcacagtggctcacgcctgtaatcccaacactttgggaggctgaggcgggtggatcacttgagatcaggagttcgagaccagcctggccaacatggtgaaaccccatctctactaaaaatacaaaaatagccgggagtgatgatgcactcctgtaatcccagctacttgggaagctgaggcaagataatcacttgaacttgggaggtggaggttgcagtgagctgagattgcaccattgcactccagcctgggtgacagagtgagactctgtcagaaggagaagaaggagaaggagaaggagaaggaagggaaggggaggatgaaggaggggaaggggaaggggaggatgaagaaggaggaggaggagaagaaaacttttcaataataagggccaactagaacttaggcttgatataaggatcaaatcgaaaataagacctttcttccctgggaatgctttcagttgcatcagatgattcagatgaatggactaagaatgtgactttacaactaaaacctgatggacttacccttaattaaacagacagaaggaaaagcaagaggagggggaggggaagaaggaagaggagggaagaagttattttaaagtccatgtccactaactggatcctctctgtaactgtttctatttccagttatttctctctctttttcttttttttttcttttttcttttttttggtaatgttgactttttgttacccacttatttttaattcagtaacattcattatatctgaaaaattatagaaaaaataatacttgggattaatgctttctttttccaaggaaaatttatgtttgcttctgataagcagctagaaggaataccaaccacagataatctaattcaagggattgagatactttgaaactaaactttaatttgtacaaggaccaactctttttttcctggttcattcttactcttagagggtagtccttctaaatcccaaaccagaccatggggggatattattaggggtccccatccttgacaggccctggacctccaaattgtgttctcagagttccattaggctataaaaagatctgctcagtttttcagcctctcagctgcctgttctggtagctccaagagctacacctctctgagtttctttcctctctggaatgttagccttgctatgcttcattttttaaaaactgccctgttcagctgttgtagttgttctctataagaggttgacctgcacgttatagtccactgtcagcagaagtcaacttttaatattcacaaggactcaatacagacacacttacaggatcatttttagattcaaagatgtctgataagcgaactaatatcaaagtggaagctgaacagtagaggtttctggataggaaaaggtaatggaagggaagaagagaaaagcaaacaaaagaatgaaagaaaaatcatacaatactttatggtgtaggtattctttgttttacaatgaggacactgtggtttacattaaaactgagctgctcacaatttatgcagatcagaggtgctgaagtccctttcaaattcaggactttttgactccagcctgtatttggttctcttctgctcaacatgcctacctggcattatgcctttgacctctgacagtcttctaattcctgaacgttgggagttaatctgagctctgggattcaactgaaaatcttagctattaaacttgattgttttatctctctccatacctccccctgactatacaagatacccctgttccagcaatactgatcaagcgaggctaactagtcttagttctaatctttattgtctcctcccacgttgttctcttccacaatgcaaatgaatacgaggaatttatagggtgataaggaggcagccttaaagattattaagtcagtgcatggacaatttctctggtctctctacaccacccttcctccttcttcctttctttacttctctctgtctgcctttctttcttctcttaacaaatatcaactgaacaaatgttgtacactaagtactttgctaaggacagaatatacagtggtgaaaaaaatcaggtgatttatattcacctggaccttacaggttaatgaccagtggtaggcataggttgaagctgtattttaaagtttatcaccctggagcaaaggtgagaatccatagaagaccaacgaagaagagaaagagcctagatctctgatggcacattttttagtactggagcccggctacagaactcagatttcctaaggatgtgcccgcaccttcagtgcaaaaatacagaggcctaggcattgcttcatgcatcctcattacctttgagtaacaatgtcactttgggttggagtgaccttgtacctgagaccccattccaacagaacctttcagctctccacctcccttggccacaaccccgactacatagacatgccagctgagggaaagcctgccagtcagaggaatctgcccttcagcatgcctagggttagggagccagaacatttgacccaggaaagagatccacccaagaccttaccagtgtaggtacttttttttttttaattctgagaacaagttagagccaaactgattaaatgacaaaacaagcattgagtgttttcaaaggtgtggatggaacaaactgaaatagtatctgcctcctgtctcctctccactttagtctccccaatggtaatgcccactctgaccgtgaaggcacccttgaaggcaagttatttgtggttatatataattgatcagcaaccataacttttagtctgatttagtcttagtgccaaggggcttccatttgctttcaaaaagaatctctatcctttgttcatttttcccccattaacttaccacagggccaagtgcaatgtaatcatatctcattgtaatcattctgctgtcaaagtgacatcactgcattcaacactatgtttgatgttaaaccatccactccatgtgggtttatctctttaatgcaggcaagacctctattgctagaagagaaacttcaggggaaggagaatatgaatttgtgggacagttctctcctggaagagaaacgggattctgggtgggaacaggggtggggcttgcaaaacttgtgaagcagagaggctagcttcctcagtctttgaggtgaaattcacgtctttataacttttgtctatttatggtggttgttccttctggaataatgtcaaacaagtttttgttcacccgtgacaacctttcagttaattaaatacagatcccttgccctcttttcctttccttgtattttctgttcctcaggttgaacacttcccattctttcaactatttctgatatcacattttggcagaaggaaacatgggtggaaaatattgtgggaataagtacttcatgtacacttcagtaaatgacaactctttctctaacctgaaagccaaacattctgacaccagatcagagcacacttagagtgacatgtcaacattccaaaccgcctgcctgtgaggggaaacaagaaaaacgggaccaaaatatttttgcctatattaattaagaaatgttttttcttcattggttctcatatggaactgacatatttttgtcactccttagaatgatttgaagtttcatattttaacctattaataaaactttccttaagattcatttgaaattactttaatatttaaaatacaactccactaatgtgttttagagcctcatggtctttttatttattttattttctgaaacaaaaataaataactatcctttaaaaagtctctattttctgaaactgtggaaccaagaccaaaccgaacactgaaataggctccacatcaggcacaaattaatatttttattgaatttttgggataatgtgcagaacatacatattggcattttgtaacttctgttagctataaaaataacagcacatccctacctttcttttctgacttgtttagtctgagacaaaccagagaagaaaaggaataaatttagcccttggcccactattaggtgggttctgagattaatcttgtacttaatcttttaatcttagacccgtactcctgtgctcatgaaaggtgagattaatacatgtactaatattactactactgtatcaacacagaaatagttgtaatgctactgattgcatgagagtaattttagtgttccactttcaattatggtggtgcctcttactttaagatagatatttttaaatcatggaaaaagccattaaaagtggctttccaagtcttctatgaaattgtatggtgttaacattttttaaatgtcctttcaaattttattgatgttattaaatattagaaaataaatagtatttaattattgttataattgctagaattatatatatatatataaattaaaacaatgttctggtggagtctgggaagttggcggtaatggtgccataactcttgaatctacccaaatcccacagaagctacatatcaaaaacttaagctcgtgggtatacagtcatgtacctgataaggacattttggttagtgacgaactacgtatgtgaccgtagccccataagattataatattttattttttctgtatattttctctgttaaaatatgtttcaatatgcaaatacttcccattgtgtttcaacaactgcccacagtattcaggacagtaacatgctatacaggtttgtagcctaaaaataatcggctataccagatagcctagatgtgtagtaggctataccagctaggtttgtgtaagtacattctaaaacatttgcacaatgacacgattgcctatcaatgcatttctcaggacatgtccctgtggttaagggacatacaactgtacaataaaatgattcttaggcaaccccatgaaactcaccaaaacaagaattggctgaaacacagagagctatagaaactgagtggtatcaacatcagtgtgagaagtagcagctggagacatagaaaatctgacaaaccagaaaataggagaatccaaaaatgttcccaagggactcactggaaagcacagtgtgctgattttataaaaaatgagttgtactaactccaatcgtgagtatgtacagaggtatgaagaattctgggcactgtgaactctcaaaactgtcccaactccccttgaggaaagatgcctatagtgatgaagagttgttgagcagatctgagacaactgagataaagaaaacactagctccagataaaagataaaagggtggagagggacagggccaagaaatggataacagaaatcaagctgacatattgcataacaacagaaatgagctttgtgaaattagagaaactatcatgaaccatggcttcttgcaaaagttcaaggaaaaaaacactaatttcacataaaaatgagcaagaaaaaacctaagtgacaacaacataactccctacagaaaacacatgtacaaaaggaacaaaaaaagaaggacaggaccacagcaaagacatgctatttctaaatgaggtaagcatattaaaaacatgacataaaatgaaagactaacatatatcacaactggaaaaatatcagaaatgaggtgtaacaatttaggaaagaattctaaataaaagaaaaaaaacttcagaaatgaaaactaaagtagaaggcatacagttgcaaacaaatacaacagataatggctgaagaaaaatataaagtgaaaaataattttaaaaaccaaaaaaagaaattgaaagataaaatgatttaagaaaaagtagcaaatattgaatataagcaaagaagattcaatagaggtataatagcagtctctgaagaggaaaaacaaagcaaaggaataacaaatatgatgaaaaataattgaggaaaactttcctaaatgttaaaatatgcaatttattttatgctaaattatacaatatataatttaaattacatattgaaaagaaaaagcacatacctgaaaaaaaaaatttaacccattgcctgactttaaattatactgcaaggctatagtaacgaaaacagcatgatggtggtacaaaaatagatacattgatcaatgaaacagaatagagaatccagaaataaacccacatacctagaaccaaccaatcttcaataaagtcaacacaaataaacaatggggagaggacacattattcaatacatgatgcttggaaaactcactagccatatgcagaagaatgaaactggatccctatctctcaccatatacaaaaattaactcaagatggattaaagacctaaatataagatctgaagctataaaaatcctagaagacaacctagaaaaaactcttctgaatattggcctaggcaaaaaatttatgaggaagaccccaaaagtaattgcaacagaaacaaaaatagacttgggacttaatcaaatgggacttcatcaaactaaaaagcttctgcttagcaaaagaagtaaccaacagaacaaacaatctacagaatgggagaaaatatttatattaataaattatagttacaacaaagaattaacatcccaaatctataagggactcaaaacaactcaacaagaaaaaataaccccactaaaaactgggcatgagacatgaacagtatttctgaaaagaagaaacacaagtggccaataaacacatgaaaaaatgttcaacatcactaatcataagagaaatgcaaattaaagccacactgagataccatcttacaccagtcagaatggcttttattaaaaagtcaaaaaacaacatatgttgccatgggtgtggagaaaagggaacacacatatactatcagtaggaatgtaaacttgctcaacctctatggaaagcagtatggaaatatcacaaagaactaaaaatagaactacctttcttctcagcaatcctgctgctgagtctctacccagagaaaaagaaattacataaaaagtacacctgtagtcctatgttgactgcagccctatttacaatagcagagtcatagaactgacctaagtattcaccaacagttgattagatgaagaaattgtgatatgtacacaccatggaatgctatgcagctacaaaatagaatgaaataatgcctttgcagcaacatggatggatctggaggccattatcctaagtgaaccaacataaaaacagaaaatcagtattatgtgttctcatatataagtgggagctaaataaagggtacatgtggacataaagataggaaaaaaatgactgttgacttgaaagggaagaaaggaggaggcagggagggttgaaaaattgcctgttgggtgcaatgtcccatatttgggccatgggtacactagaagcccaacccgcaccattaagtatgtaataccaatgtaacatataagcacatgtaccccctaaatctaaaataaaaatatatttttaaaaaagctaattctagttaaattactgggcttgaaaaaaataaacaatcattctgacatctaggcagaaagacaaaagacttacaaaacaagactattagacttctatcagacttctcaatggcaatgttttatgccagaaataaagatatagaataacatatttaaaatactgaaggggaataaatgagccaaagagtttgtgtgcatccaaacaaactaactttcatttgtaaaggctacagacaaacttccctcactttcaagaagtcaagtaatgtttccatgcactcttgctgagaaatctactagaaaacaatcttcagtaaagtaaaattattttatttaagatatgaaaataagaattgatggtaagcattaaatgtatcattccacttatacctaaattttaagaatagttgaagaatgcataatatacaatcattataagcactgacaatacaaagtaccacaattttcagaaatgaggaaagaatgagggaataagctcaaaaaactatttaatgattgcagttatcatatgggtggagtaatatggatattgttattctgagactattgtgtgtatcatgtgatataaagccaagcagtaattatgcaatattccaattctatcatcccctcacttcttgagaaccaggattacttgtgtgaaataaatgacatatagaagtaacctagaaaggtgaattacaataatcaaaatgaactcataactttaaaaaagtttgtgacatttataaaaattaaaattaatttcataattatatataatatatttaacattagtgtacgatcgttctgtccactgaaaagtcctagaaattaaagaaaccagcagcacacaaatattcatgttgtctacaaatatagacagttttaattcttccttttcaattcttatctcacattgccacacagggtaaggcctacattatcaatgttaaataaaagtgggaaagcaggcctcattgtcaatatctcaatcttagaatcatagaaagattttcgcaagttaccattaagtatgaggtttccctaaattttctgtgaggcaataatttttaacccatattttcacttagcaatatcactgtactttttgctttaaaagatgataaaattctcactactaaccttcttgtcatctcatttctccaaccctctatttttgttaaatatattattctttgaataatgccaaagtttatagcattaaattgtgtgccataacgctaatttttaagattattttgctttagttcaggtttaagttgactcattactaatcaccttgtatttattttgaattcagtaccctttgttttcaattcatatttgtctcatgattgccttgattttgtcattgatattttccaaaggagaccaatggatgttctattttttgagttattttgtatttgaaatgtatatatgttgcttttatacattaattgtgatattctttggtctggaaatgtgtcagtaaatgtttaacaactagctctctgaaggaacaaaaagaccagattttagcactggcagttttcctgagacaaatgatttcatcatggctgattccaagctatcaacatggtgccactgaaagtaaacggaaagagatgcttgggagcacactatcacgtaatattttgcagtatctccactgtatagacataatagacataagtaactgcaaaatcatgtataatcataaaatgtagtaaaataattaggaagtaatgagtcaagcatttattacttctgttttttaaaaataatgtatttcattacaagtttctataatttagttttaaataatggttctgtttaacttttgtctgatgatactcctaaaactttaacaagctgggtccaacaactttgtcataccttatttactttagaacgatgctgacaatgtgcttttatattcatgcattaaatgttgctgtagaaacttccgaagctaactttttgcaacatgagaactgaactgatgaactttgccccacttcgtactttaagcacatagaaattctggataaaatggcaaatattaaataaatcaaaataagacaagataaatctccatgtgtgagaaaggaaaaatgaaatcaatgccagagcaataatttgaaactgattcagtgacagctctcaggtgttagaggaggcatggattatagagctgggtgctgagagtctaaagtccattcagggagaagcagctgaaatggaaatggattagaaaatctctgtccgtcatctcagaaaaatagtgagtattaggtcttaggttttggatgacgggaaggaaaattactggcacaaaagaaaaactccagacccacaccactgatagacatttgaattcgctgaatagtacattaccaataaactcagaaactaaccaaaagctagtgtggaatattgaaatccctgagtttccactgggaactctctcatcataaacaatcatgaaaccatgtggtggcaactttttataaggcaagacggaataattaattccttctgaagatgaacaaggtatgaaaaagaagaaagcaataaggaaaagattgatgagatccaaagggccagatgacccaacaaaaagaaaaattaacaacccaagaactagaagtaatggaataatatggaaatattcaaataccaaagatgaataagagcactggatataattttaagataacagaccctattgaaaagaataggtgaattcaaaagggaaccaattagaatttctagaaacaaataataaatagttcactagacattaaaaaatgaataagtggattaaagaggagggtagatgcagctgaaaagaaaacatataaggtggaaaatggagaataaaaagtattttcaaaaccacatgggacatttataaaagattttccaacaaataccaaaataaccagtaccataaatcaccttctctgataacagtgtaattaaataagaaataaatgttcaagaactgaaaacaattcacataatttttataggtttaaataaaagtatcaaaaaaagaaaccagaatggaaattgtgaaatagttgaatttaaatgacaatgaaggtagcacagatgaaatctatacaaagtagctagagcagtgttggagggaagtgaagagctttgaagacaaatattagaaagataggcctgtgatcccacgctttgggaggccaaggtgggcagatcgcctgaggtcaggaattcaagaccagtctagtcaacatggtaaagccccatctccactaaaaacacaaaattagccaggcgtggtggtacatgcctataatcccagctactcaggggctgaagcaggagaatggcttgaacctgggaggcagaggttgcaggttgcagtgagctgagatcgtgccactgaactccagcctgggtgacagagcaagccactgtctcagagaaaaaaaaaaaaaaaaaaaaaaagaaagaaagaaaagaaaagaaagaaagataggtggaaaagtcatgagctaaatgttcagtgcaataaattataagagtacgttgaaactaaagaaaatacaaagttggaataatgaaaatcagagaagttaaagaaatagaaaaataaaacaagatgaacagaattaaaggctaaatctctaaatgatcaataaaacagaaaaaggtctatcaaaactgatgaaacaaacaaaattaagacactaataaacatgttaaaaaacaaaaagacatacatacatcgcagaaacttaaaaagaatattttgaataacttgaattcaataatcttgaaaagttatataaaatgaacaacttattttattttactttcttcataagaaaaagaatgtaaaactatctcatttattttttatagtgattacatattaaaatgtcaaaatggcaatatttaggacatactgggtaaaataaaatattaaagttaaattaacttgtttctttgaactttgtataacgtagctgctagaaaagtgtaaattacactgaacaacttaaattttcaatataattacaagaaatatgaatttcagttgattttagagatgagtctcctttaaataataacgaatctatagattatatgatctgttctagtcatagaaacaaatttgttaaaaaatgaggaaacacttcctaaaatctttttataagacagataacttcaaaacgaaaaattgacaagaaaaacacaagaaaacatattaaaataatgacagtaggagtaataataacttaaagtgatttagctccagacactttcagaagtgatttatacatttacatgttcctcataataaatctatgatttaggtaacatggttgtcctcatgttacagaagaggaaaccgtggcagaaacgtggtgactaatctcccctaagtcacacagatagtaccctgtgtacacactcaaaagtgaaccaaacagtcttgcttgggatcctctgctcttaatcattcacttcaaattttttaacaaaacattagcaaaccaaaggtaacgatgtatttttagcacaaaatgataatgtaaggttgagagagacattcagagtatttcttcttagtcaccaattcacattcctagcatatgcaatctccagtccattgttaggtgcccataagattttacaaattgacaaacatatcttctttctcccaaaactgttcaatctcagatttgttccttttccatccatttctgtctggctatataggcataatacttgatggtcacaccatccccttcccaccccccatcgtacttaaaaccattcaatgatttcccattgtttttaacataatgtgcaaatctctcatcacggcctccaagatttgttcacagctgacctctctagcttcttctagaatcatattctttctggctttctgtacttcagccacactggccatctagaacttgaccctgtgcatttgctcatgctgttctcttgcaaagaactccccactcctccctttttctagctgtcttccactcttgaaggtctcacctcaatatcacttctcaagggaactctccactgagcttcccacctcctaagactaggtcagtttccctcgtctaaattctcacagcactctatcccttttcttggtagcattatgcatacgtgtaaattcacatctatttgtgggatcatttcatttatttttctcttccccaactagaatgcaggagaacaaggcccatagcccacatactttctttctagcattgattaaacactagttaaacaccagtgtttaatgcaatactttcactttgttggaataatttaagaattattaagagaggagaagaaaggagtggtaagttatttgaaaaagatagctgcaattattattctccatgtatccatgccccttgcacctcctcccatcaagagataggatgtatttgccaacccccttgtgatgtcctttcctcaatggaatgcagcagaggcaataatggcgtagtggcattggtgctatttactcatctaggccagaagagatcctgtgaacttctgctgtcagtgttgaatgattatgaccaaggatagcctaatgggggatgcacaaccacagagagacgcccaagcctagaccatcctagactagtcagcctcctaccaaccttctggctgacctctgacacataagcaaagccagctgtatcaaccaatggagactggcctacaaaatcagaactgtcccactaatccctagactcaagagcaataatacatggagtatttttaagccaccaagttttggggtaaagaaaaaaggaagaaaacttaagagggaaaaatggagaaaaagatataaaggtgtgtgtgtgtgtggataaagattcaatgtttagctgcagaaaaaaatgagttcgcccaagaagttatgcaaagagaggtctaggttcaaattaaggctagacttaataaagagctgagtcttcaaaaaaaaaaaaaaagaaatggaatgaaatccttgttgtgcaccatccaatgttatgaataaaaaacaacaacatgggattttggagctagagttttaaatcccagtttactagtactaagtatctagataatgttcttatctaagtgtgtacaatgcagccaatagctactactctgcctcctgctttgggagggcatggtgatactgatgagactatagttctctcgctacaagacctgccagtaaattctccactcacaggtgaattctggactcacttaccgctcagacttgggctgacgtttctcaattagggccccagatgtccctgtgcccgtgggatctcagattatccctagactgtaccacagatatccactgacatgaattatcacagtctttctaaccagctgaggttggagcctgaccttgaatttattctctctggacaggactctcactcccatctgcctcttccaagcagtccttatatgaatgagaccttgagcctcattgcacgtgaactgccatctttattctcacttcaatctatttagccttccttgagctagataccagcaccatcttacctatgaacccagactctactcaaatatgtcactcacgattcggctggatgctctgaacaacaaagttagaccccactgatgttcattaccctgaaatggatgtgatgattggggttgtctcctgtcaccctttggagtccagccctacatcaagtctgttcccgtaaccccacctctgacaatcactaatagacctttgagtctctttctgtagtcgagaggtcctagtacatctcatgagaaggtccccgagggttaggccacggacattgtttaaaaatatataaattataaagtactctacaaggacttagtgttaccatcataattatctcatgatgatccagttcttgctgccagagatgctgctatgtagaggaatgatttgagatggagactggacttctaagtgccttccatgtttaatcatccgaagtcctgcagatgcactgaattccattttaaaattaacagaattaggcaaattaggcaaaatcctattttctacatgaatttcaagtattgtttgatttaaacctttctcttttcaccacactcttttaatctaagtggtagcagtaaaaagatgacccaactaaagttttgccaggtgggtaggtctagactcatcaaaataaaaatgagcaaacaaaaacgaggacttgctttgtgtcagacaggtttctaagtgcttgatgctactcatttattctcacgacaaatgtatgagataagggctatgattatccccatttcacagatgagtaaggcaaggcatgaagaggttaagtagcttacccaaggtcacagggccagcaaataggagggcaggaagtaagccctgaaaacgtaatccagggatctaggctctaaaaccctacatcttccatgtggatgcacaagtcgctgcttccccagtgcccccacctggtattacagagataaaatacagcttggtttccaggccgactctccctccaagtcagaaactcccatctctggtgcacatgaaccgggattttccagttgtgcttggcgctggctccctggagagaatgtagcaaattgggaaggctagaactatctcctgcccagtcctgctaattaaactcctccaactgacactttttggctggttccaaaaggatattatttttagcacgtgagggttaaaggggaagggaagtgtgctagattcaggttgttagagagggggagaaagagaaaggagctcggagggatgcattatgattacgactcgttttaataataagatggagaaaattgggagtctgggccggtctcaaggccttaaggaaggctcctaaactctgtcaacctccttaatggttctgccacatttaaatgggtggaatatttctctactcacacagtcccaatgggcctgcaattgcagattttagaagtatccagtttattttattattattattattattattattactatttcctggaatgaaaagaagagtaatgctttgcaggctggggtgaaaggagcattccatcttccccacccctttttcttgcaaggctctttgacagccacaccctggcctaccctaagaggtaacaaatgatgtactaacatgaccctgattaggaagctgggaggttaatctgcagggctccttctgataaagaccaggccagaccatgcacagctcggccgattgataaactctgggcctgcataaccacaggagcccatctgaggtgtagagtgtgcagttctgcctcccaggactccatctatctacgtcagtttcacacactcacccactgcctccttccttctcccctccctctctgcttctgttccagtgattaaagacgcaagatccctagctatttacccgcagttctgtaagctgtcgaaacccaggggacacagccctgttaagctgaagcatgaaaccttgcacctctgtgatacaaaccatgaaatccttaaaactcaattcacaggaaaaagaacttttctcttggtcccgctcttcatgtgattaatagatgtcattgtttagtctgacagcaaaggctccattgtgtgacaagctaacagttttgctcctggacagagcaaagagagaaaatgcccatgacactgggaagatcatttttttcaggactcaatgcaatgccatttttttaaagagcacactgatggaaatttcagcatatgcaataaacatatactgtagaactgaattaatctgcttgtactgaagggcaactagtgtgcattgtaagggtgactggtaattaagtgtactaattgagaggaggtaagagccagacctggatttgaatctctgctcacccacttactgcctaaatgaccttaggcaagtggtgtctccctttaagacatagatccatccttgtaaaacgagattaataacagttacgtcataaagttgtatccaggatgccatgagatgattctgttaatgctctcagcacagtgcctggtgcagaatgagtccttccctaatattagtggtcattattaggtcagccatgaacataaagaacagggagagacctggggcaagaccaaatccacagcatcatctttggcatgaagtaggttttacttttcaagcctcaataaactggctgcttctaataatcaatgggtacagaacacatagcagttgtcatcagtccagagcaattgctcattgtgataccaaactcctccttcaattagcaactgtttatttaaaatatgctcccccaaaaaagtaaagtctctcattttggagacacattctagagactgtaataacttggattttaatactgggagttgattaacatgtgatacattttacagtaaactaaataagggttttactcatctatgcctcctaagagaatgggaaaaaatgctttgacttgaacattttgaatgatgctaaatcaaacatatagtgatccttaatcttggctaactttgcccacccacccattctcctggaacatttgacaatatttggagacatttttggttatcacaacgagggtgaggggagttgccactggtatctagtgggcagaggccagggactctgctaaacatcctataaatgcgaaggatggcccccaccacaaagcatcatccaattctaaatgacactactgcttagggtgaaaaaccctggcctaatcaaacctgtagggtggtgggagaaaactagatattgtaattgaatatttaatgaaatcttaatgtgtgagggaatttgcctagaatttaaattactgccttgaattgaaacgaatttcacctaataactcatttgcgaattatttgtaaacactgtagtttctgcttttatcttttgtatttaaaaaaagtttgccaattatgaaatactgtgatcttccagattgtcattgtttcaaaagctgctcaaggtggttcttttaatttagtcttttgcaaaagccaagagagtcagaagctgagctaatgctgtctccatcattcatgatgaaaattgtccccgcaagcactttcccctgttccccccaccaaaaagaaaagaaactcattgcaaagatttcacttaccttaccttcaatgtaaagattttcctcctctaaattctccatgagcatggttcctaatccgaggataggatttccccaatggctgagatggtggaaatcaaaacattcgaaaatataaggaaccagatataggtcccactcactgtttagttttctttgcctttcatgcccacagaatacagcattgcccatctgagaaagtcattagtgagagaagagcttttataagctcttccttgaaaatggggcatgcttgctgtttttggaaaatatcagcctggaagagataaagttccgtagagggcaaagctatcaaagccaaaatcacacgattctttgatttcagaggcccttgcttagaatttggcactgccccacctccatttccccctctattcccatggatcaaccaaagccataacacagccctgggagcccagagaggactatagtaaaagtagtatttattaaatgtgagttatgagccaggaactgtgcaaggtgctttagagacattagttcctccagaggaatttcagaagccacaactaggttagtgtaaaaacagtttttttaagggtttgagtagattcttgtttaaactaacacaagcctaaatccagattaataaatatacttttaaaaaatgtcaacacagccatggagttaccgtcttactgacacactcttcattgcctctttccttcttcacaaggctgtgatttccttggagcatggcctcttaaaggcaagtgatttatctgcatctacttatccctatacctagaggaatacctggtttagagtaggtcctcattggttcctgctgaattattgtattttaatcccaacataagtgaatgttttgcatgctccctggaacataatagaaactcttaatatataatatactaaattgaatttatccacaatacaacgagtctaaaaacagctatactatagagtgggtgccaaaatacaagtggactaaccttaaggacagtgccttagggtggtacttgtgaatataaaagactcacttatgtttactagcatggcactgggacagggaagagcctcttagagtgcagaagctatatatttgcacagaaatccagccaaggtttgcaagcagtggtgtctctactctgagaagcagtgtgggctgcagtatgatggctacttggagccctgcactccacctgacctgtgtgtgacccttaaacctgacacctcagtactcagctgagaggagacctgggggatgtggacaagcagcacccagcacaaccaggtatgtgtgatgggaggcatggctcagctgaatggatgacccagcatcaggctcaatcctgctgaagaggcagagaagatagtgttaggactattgagaatgaacatttcaaaagagagcaagagtgtatgctctctgcaaatccaaagagctttctgccattgatgaacgtagtaggcagcagtaatggatagtactagaaagcagtagagccttctcaagcagtagatgtgaggtaaacagtctctcgctgagtggtggatctccagagaccacattactaaatcaggagagacagcactaacaacatttagatatttgaaaaatatcctcagctttaaaataaggataaaagttaatacataacttcccaacttcctatgagtaactctgtaacatctggacatggcttccactgagtccgtaacagagacttcagttgagtgttcaaaggtgtaccacacattggccttcacttcctaccttctattctttttttcatttttggtgagcatttatcatgctattgtgttatttactagggcaagacaccacccctaccttggaggaatgtttcgggaagatacatattacttaacaggatagcatgataatgacaataacagtaacaataacaataacagctaacatttattgagtccctatgatatgccaggcactctgacaggtgtttagaggttggaataaccctatgaggttgggctcctgggatcaaaatccaatgcctacttgatggatgtttctttccaaggtcagaggccatacctccttacccttatgctgtcagggaactggaagagagacttagcaccaacaacatagcaagcatgtcactaagtgcttttgcctatgcaacctgcttcaaataagctgaatcataaagatttctaagacagcaagaaaatatccatccaaacatcataattagaacaacaaatacttagttcatggtgatctactcatttgataaatatgtactgagcatatgctatatgacagatactgttccagcctcagacctgtgcaatgaccaaggccaagaagtccctgccctcagggaaatcacatcctagtggaaaaaataaactatgacaggaaaataaaaagaaagaatacataaatgagattacttctgataagttctgggaaaaaaaattaaacgcttccaagtgatagaaagttcttagttagggtagcagagggtggggcagagccaactgagcagggacaatctgagaaggctccacagggagacatattcaactggaggagccagccttgctgagattagatggaagaccattctaggaagaggaaagaggaatggataaacagagaggcccagaggcagaaaaacaaagaaagccagtgtggctcaagtgcaataaggggacagatgaagacagagaggtcgacaggggactgatcacacagggtctggtgggccatgctaaggtgtccgaaaatgccactcacattctatgtaggagtgtgacatggctctatttatgtttagaagagatcacccatggtgccatgtggctgctgtcctagacagccaaatacaagtgactatttgccattctaaggaccttcctttattcattgaattcagaggcactaactgtggccagggcatgctgccaaactctgaggctgccatggtaaggtggacagagtccctgccctcgagtagcttacagactcctggggtttacagttccacacgtggaaaattaatttctgggttcctccactgggaaggttcaggatattcaagacatagccagggctctaagcccaggtacagagtgacagggctttcgggaagggatgacttcccaactgagattagatggtcataaggagtcacacaggggaacagagggagtcagggcaaaaggtgtttatggacaaggaaatgtcagtgggaacagggaccacagtccagcagggcaggtgtggagcttaggagtcaggaagaggccagagaggggactggcccctacctggagagggctgtgagccagaggtggggtgtaagtacagagtgcagcagtctgcaaagcagggcctcagcaaatcctcatgcaacaggactaaaggcatcttccaggagagaatccagacacaggcgaggataacatcaaaggatttctgtggctggctggttgctttagcattcaaggtgttcttcccccaaccacagctttcatccaggccctctggctccctggctactgtggataagccactttctgcttctcaggaacttgaaggcagttacttcctccaaactgaattttggtggctttatgtcaagtgcccagatggagaaagagaagctgtgattgctgctgctgctcccaaagccgcaagggagctgtttgcacaacataatggctggtgccccatcagcccttctcctatagagcagcacccagcacaaccagatatgtgtgatgggtggcgtggctcaactgaatgcatgacccagcagcaggctcaatcctactgaataggcagaggagatagagctaggacgattgagaatgaacatttcaaaagacagcaagagcatatgctctctgcaaatccatacagctttctgccattgatgaaagtagtagacaggctattaagaacagcttcagagccattcagcccaagttcaaatcctgactctgccacttcctagttctatgatactgagcaagttgcttaaccattctgtccctcagttctgtcatctaaattgagccaaaaatggtatttagtatgaagctgttatgaggacccaggaagttaataaatataaggcccttcaaccagtccacaacatatgataaatattcattaaatgttagctgtcattattccctgtttgccaagttctggagattgagaaatggacagagagagacatgtatcatttattgatgacctactatgtgtcaggtattttgtatatattagttgtaaggttatagaaaacatgcctgaaaattttttactatctcataacaaggtggagtgtatttctcctaaatgtaatagagtgacgaaaattccatactatagatatataagtaatgatttctacataaagatgaggctgcaagtaattatgattggggagaggggtgaagtgtggaagggaacaaggattgcagtggaaagaaattagcggacaatttgactgttgttcttctttagtcatttcttagaattcatgatatttacaaagcacatagcagactacacttggtaatggaatttccctatcttcatttacttgttcccttgttaatgtccatcactgcaagaggcattaagtatggtgctaacatgccagtaaccccacctaagcagagaaacttcagggagccatgtcatgttaccctaccccatcctgcccagtgaaaccagcagggtagccaagacttgctgcttgctcaggacctctgaggaactaggtgcaaaaacccaaatggaaagagacagactcataggattcctctttgagtggcaaattggatgaccaacagagaatcaggagcagaggtaaaagtagaagcatgtgatagtcaaagccatgaatgaggagaaatgatagagtggtgagtaaagccaaccaggaggtgagtgaaaaccaggcagacacagacgtgagcagattttagaggcagtcctgcagtgaggattaggagtctcttgctactgcagccagcaatacctgatttcacaaagcccttgtaagacaggaacccatggtccctgcccttcctgaggcctggccattaactgttccctagggtttttgagacccagccataccaagatgcctgattcagacatccccatttgtaaccttagagcaatagttctcagccaggggtgattttgttccaagggtatgtttggccatgtgtggagacagttttggctaccataactggagatggaggcatactaatagcatctagtgggtagagaccagggatgatgctaaagaacctacaatgaacagagtggacccccatgacaaagatctgcccatcccaaatgtcaacagtggtgagattgagaaaccctatcttaaagagtcaactccacatgacttgaaacaaccgcaggcagctctctgcctctggaaaccgaaagaattcaagaaatgcaatggtttttcacttctgccatattattaattcttgagggcattttggggaatgatagatttgcatcctccacagttcattgtttgggttctgctgcaaagtagtcatttaataatacaatgaatttgccttgtaattgaagatgggtttcaacctctgatttaaatctcatagacaacggcacccttggaaagcgctcaaatcacacataacacttcgtatatgcaacatacatggtttacatatagatacagggcttgttttgtgttgattcttatgtttgaaaatttgaagtttaatatgttggttgcacatcaacatattgggaagtttcacgtgacaagctgtactaggaaacttgggactctcagatgcgaaaaaaaatttgtgatattgagatgtctgtgcaataaagactccaaaaggaaaaaaggcagatgggaatcacagatttaaagaaataacatagagagacatcattctataagaatttatctcagagtaggactgcgggtgataaatctgaaggagctgtcttaaactaaaatataaagatcaggaaactgaaaagagcaaaacttttaaaccaaataatatcaatgaaagttgtaacataattatctttaactgtcatttatttattacccataagatttcaggatccagattaagtgttgtgcatgtcttatctcatttaatactaggaaaacttggggctcttttttcatatctaagatgtcccataaccagttagttgtatagtggggtatggagcctgcattttcagtccaaaatatttttattttctagggtaaagacaggatttttaccctaaatctaagccttcttctgctgagaaaacttgatgggaaattcacctatctcaatgtgtttgctaggacatctctataaggaggagaaacatggatcccttttgccactgctaaatgatcaggaagacatgaagagcattctccaatattcttaccactcttggctatggagcactctctggcataaatgtgtttggctctgttcttcagctacaaaatattcatatccaagctactgtcatagtgatgtcagtttagtgaatgacatgtggaactagattaaagtaggggtagctaaatgtggagaaaacaagtaagatacagaatcaagaaacacacctatttcccaaggtaatacttcaccaaaactagccctaaagaactttctatttctagagattcctaccctttgtaagaaatagccatgaattcttctcagcctgtaaggggaagacacattgttggaaaggtagtttaccctttgattgtaataagggcttgaattttacctgtgcttttccagatatgacctccagccccaagttgtcaagctgactgctcctagcttcctttgagttgatggtcatgcctcatgattccacattcagaaattcaagccttaggtcaaattccatacttctgtgcaaatctatagaaaaactaccttctaaataacctgggattcatcttttaactctcaaatgactgatacttcctgccatacatagaccaaaaagagtgttttctataatttcctgaaatcttatgtagttagaatgtttattatatcttattctactctattgttaaaatatagtgtgtaatatatacgctgtaatatattgaaatatgtttataatacattgtattattaatgttatagtataaaatgatgatttttttaaagattgctaggctttaggaaaaggcctggcacgctatcgtttgcaggctaaagctatcccagcacttgtttttataaataaagttttattggaacacagccatattcattcatttatataccatctgtggctgattttgcactacaatagcagagttgagtagctgtagcagagaccatatggtccattaagcctaaaatatttacaatctagtcttttacagaaaagatttgccaaaccctaccttagaatagcataagaactgctattgggactcagtttcctcattaaatgaaaggtttcgctgagagatggctaaaattaagaatttttttccattttctcattatttgatcaaatccaaatccaaatctggggcctctcctgcatttagtattccagtaaaacgtgaaggccatgtccccaaatatcctaatatcactaatgatgctttacacatgccttaacttctctaagaattttgcaaaagaaatgatgcctgttaggttataactgttctatgctacctacatatatgcatctgtcatgacacttaactctatacctcaagccctttgtccacctctactgcccttactcatctcatgcctacctcttcttacccacgctggcattgcagccataaatcctaacactctggaaagagccagatgtttctattttatagcatgttaacctcatcagtaagctatgtttgataagatgttgtgcagcataagagcaaacctggtgtgtgcatcatgaatgggtgggcccactccatgcctacaccttggtgccaccctcagtcttctccatgggcagtgccactagccttccagctcttctctgctttggtggcttgtgcttctggtcttcaccagccatgacttcaatgtgtggcagcttgcaatgtgtgcatttggtatttggactgtcccctctgacctctggcttaaccttgatgatctgtgcacctggactgtccctagagcatggcctcatccgaccaagcctgtctccactataactctgtctccagttggcatgaggtaagcagtgtggaatcagttagaggccactggaagttgaatgcagctaagcagtggcaaggcccatatgaaatggaaaggaaaggagctaatagggcagtagcttgacttagagaattgaaaggtgcaattgtttaagtgaaccaaatatgttctgctgaactctgtgcctctctcctggcttgagaaagacaagggccatacgtatttgaaagacgcatttggcatcatctgtgtatttggggaaggaatggtgacgagaggttggggtggaattgtgagaggcctaaaatgccaaagacattcctgaaatttttggctaacttgcataagaagcattggatcttcaaaattttatgttaaaacaaaagcccacccgcttacattaatgctttactgcagaactcacacagcctgatggtgaggcagataaacttggggccagactgcctagtttcaaattcggggtccatctttcaccaggtatagaaattggagtttacttgacttctctgtgcctcagtttcctcatttgtaaagcagaaataatagtagtgagcaccacatttggtgatcaggtagagtactaggtcttatgcagtatgtgccacagttgtccacatcattgacttttcacaatgagtagtaatacagtaggaactagcagtatccctgttttacagatgtggacacagaggctcagaacatttaagtaacttgtcaaagaacaaaaagtgaggaaacagcaggatctagaagcaaactcagatctgttcaactcccaggttaggcttttacatgttctgctctactgacttatttattgatttttaaaaatgtttgtagtaaaagtgattctttctcttaactttttagttttggaaggtttgtttctagaaatcactatccatggcccaagacatcaatgcagatggtggaggcaagggctgaggctggtttgtattcagtttacatccttttcctgaaaaaatcaccacagataacaaataagcaagtctgggaaattgtggagatctcttttttgatttttttgatttttttatttttaatgtagcgcatatcattatgtatttttgctaatctagagtatctaccctgttcatttgttgcttctcctcttttatcttctcagtcctttcccttagtaatttctgacaatgccccattgcagaatactagctattgttttggatgtttcatgaagaataaaatctaaacaattcttgttaaaaggaaaggctaacacacacatgcacacatacacacacacattatataacactacatatatatacacatatgtataaaacactatgtatatgtatgtatttgtatatgtgcatatatatacaataatatagtatatgtatatgcatatgtgtgtataattatgtaattggagaaatcttatgctttagtctgaaagttgacatggagcatgtagttttttgtatccatactcaccaaaagctggtgcccattagaaagattttgctattagatgatattgagaggaaacagttaaattgttaatttacacatacatagattccattttggtgctgataaagaagaatgagggcataagttacaaccttggtagactcatttgagctgattcaaaggggcccaaggctagaaaggagagcaaagagaaaggggcaggaggtgaaatgagaacatttctgcttgagttcctctggaagaacttaattagagtccttacttggtgtttgactctgtgctaagtgctttacattgattaacatttcacatgaaccctttgagctaggtattgccattattcctattttcaagataaaaatctgaggtatgagagatgccataccttgcccacagccatgctgctcatacttgaagaagctgaagcaatctgattccaagctcacttgattaagctctaaagccatcctgaggttggcacctcctagaacacagattctctgaagtacaaatgtacacttgttggagtctcagcctaatgaggattagggctggactaaatgtgtgtgtaagtacttcaggaaccacatgggagtgtgtgcattttggggagccagccatagcactaatgtaagtatagtgctgcaccctgatccaaacaataaagagagagagagaagcaaagagggagggagggagggagggagggagggagggagggaggaaggaaggaaggaaggaaggaaggaaggaaggaaggaaggaaggaaagaaggaaggaaagaaggaaagaaggaaggaagaaaggaaggaaggaaggagaagcaaggaaaggaaggagggagagagggagtcaggcagggagagagagagggaagagataaaacaccagcttgtgtcagatgtcacttgcagataagttgagttttaaggacacctgcagctgcaggtaaaagaaaacccaaaggagctcaataaataatccagagatagagagaccctgtatttagttaattcaaatgctcaatcctcaacagagacccaaattctttccatttctctgctctgccatcttaaattatgaactttgcctttaaatgatgtccctcagtgcaaagtagtttgagaattcacatccagatgtaaacacattcagagaaagaagaccgtctattttgatgtgttcttcttaagggtaagaaaacctttctagaacccccatcagttcttgcttgtatcaacaaaaacagatcacagatctacttctagaccagtctctggcaaggggaagggacccccgttgcatatattggcccttagagatagatgggatcctggttaatcatcatgatccctctgcagcagttgatcataacacatttgtgcccatgccaaagaggccatctccgctaaatatatgaacccactgactgcattaaacctgagaaaagggatctaatgtccaactacccaagagcagaggtcccatgagaaagggtgtgtagtttaggaaagcacagctttgtgtgctgtttgtcagtttccctcaatacctagggaattgcacatttatttgtatattggaattggagaggtatcaatagaggcaaagcctctgccctaaagaactttaaattctaatggaggtggggaagcagagacaaaaaaaatagaacaaccttataatttgtaaggtggccaacagtactataaagataaaataaagggtgacaaggaaatagaatataacaagagatgtacatccttccttccaactggaaagatctcttcatcttcccaggctacttgcccaggtaagttaactcctgttcttcttccaggtgtaggtttatgcatcaatccttcatggtctctgtcttctggagctctcccttctcttaaatgaatttctccttcttatcaccagaattgcaatttcctaaatgttcatgtgattgtttagtagatcttctcgagatcataaaaaccttaagaaccaggaactcagtctatttgctcaagattctgtctccagcaatgagcttattgtttagcacatagtaggcacccaagacattatttttgagtgacggaatgagaaaccaaaaaaaaacttaatagtggcttttggtggggccacagaaaagaaacatctttccttggggccactggttcctacctagtatgacacattgcatctcaggctgacgcaattacagttttcctgctctggacaagttctccagattcacatgccttccctgccaataaaggattttaaaatatgtaagctacatattattcttatatcctgtccttcattgggtaacagaagtgtttttcttttgtgcagcttgtaccccactgagacagcacaggaagcacaaaattctatctttccctggggacatgtttgaaaaatactctagagaatagaattgacagccaagactttgtaacacccttgaccaagaaaactatatcccacacatggcttctttgtgtatagcaagccagcagaaaataatattgtatatgtgggaaaatgaacatattgattgtgtttgctgctcccagatacattttgtttcaggcataaaagacagaaaggaagttatggttcactgagtgtctatgttgtgcttgacacttttaatgaaaatactaatgatagaaaataagattgagtgcttgcctgcaagatctcattcaatttttataatgctttgaggtctatcctattatgattcccattttacagatgagaaaacagaggctcagggatgggaagtcacttgcctgtgatcacatgacagatgagcaatcaggatgggatttaagccaggtcatactgtttccaaaggatttggtaaatctccaaacttactgccttagtttgggttctccaggaaacagactcagaaagagcttgagtgtaggtagtttttgtggggggtgatctcaggaggcaggagtgaaggagctgggagagcaaggcaagaaggtaggaaacaccagcataagggtgcttgctgtggtttcaggtcttaactctgcaggatctcttagagaccagggcagttactaccaccagcgtcagtccctgcctggttgaatgtgctcgtaagggtgttaattctcttccactttcaggatgtgtctgaagagggctgagtagactccagagaatctgaaaaagactttgagtcaaaaagcagaaagaagcttagcaaatgcatgaaataggtgccgtcagcatgagtctcatgaaccggactccacagctgcagctgagtgtgtaggtggcctgagggatgcggtgccggccactgacaccaacaactctgttacacttattctagctcaagttctttttcctccttcttcaccatgaccttgtgagttaggagatcagttttcaactttctagctggaaaggttgaggctgtgaattgtcaatgacttgccagaaggcacacagtaaacagtgcccttgggacctctgtttagaggaagagcttcacatttagcttgctttctattgtgactcactctgttcaactaagttatgaacaagcctcgatgcacaaggatgaaagaaatcagatttgagaaagcccagtcttcacccatggacagctgagaaaggcatgagacaggaatattataattcatctataagaaagtgctcatctaaagaagaaaatgctagccagacttcctctgagacacagccaggtaagcaggaaaacgtcattgtctttagaaacagaggagagcttacagtctcttaatatttttaataacctttatatttatacatttatatattgtaaacttatatttataagttataaattaatatttgttatgaatttatatctatatattatacatttataaatatatattttttgatttacattcatttatattatcttcactacagtaactacattcattaaatataaactttgacatcctatcagccctcagaggtctgcttggagtattggagaagacactaggtattttgtctgctttttaatcagtgaatggtctccaaattaatatctatgtatatgtatatatttatattaaataagagtcatttgggggatgggcatcctatgcataatatttgaggatcttcatctctttttccttcaaagaatcttcagcaaatgtgcaaaaacagattgagcaacccatgatcctgtaggtttccagttttgtcttcactctctgaacagggaaggaaaagacttgaggcaagtctctagatttcaatcatccaggaagcaattctgggtgataataagagagactggcaaaaaagggggaaagaggggaaattactggcttggtcaaagcttgcaaaatggcaccagtgattaaaacatcttatgctgtcctcgggctgcagaagctatcactgacaaaagagctcatacacacacacacaaaaggaaagaaattagccattaagaaatatttcagcataatgcaattattacagctgtataattgaatggggaaaccattgatctgtagtagaaaggaaattgctcttctcattgtgttcctatgaatatgtgaacattaatctccatctataatcaacgttcatttcaaatctgattgcatgctactaaacacccgtagctatgctaacattatgttaatatggttcaacatcatagctcccagcttcacagcacaaatatttttctttggcaatcaatagtaatttcagctgagtggatggaagtcacgttttaatggtaatctttcctccaagcctccaagtggaaactcagttggtgtcttaacatggctgcagcatgttgcatataatcagataaattaacctgaaaagaaatagagagagaggaaggaagggaggggacatggatcagaaataaggaggaagcttagcaaaactctagctaatagatgaaagtgtacattaggtagaaaaagagtgaggatgaatgggtagatgggacagagtgaatgtgtgtcggaggggcatgcaggaagggttgttaagaaatgagactgtgttccttctggctataagtcaatgggatgggatggagcagccaggatcctgggcaatttggattttgccaaagcaaccaagatacatgaggaaggaataggaaacttaacaaacatgggtggatggcataccgagtcatctctgcttggaagagttcactcagatatctcctccttctcatatccacacgttcatttacagcaaacaatagaaaatatagaaaattttatagatttctatatctataaaacatacagataattttgaaagtgaaaaaaatttataagggagaatcttttatttttaagcatggctactgctggacaccaagaatatgaagatgaacgaatgtcatctctgatcactaagagttgatgacccagagtgggagaagaaagataaacaactcacagtatcaacccacatctcctgggatcctcctccttcccctggccataataatcctctcccttcatatttttttaaaagaagagagagaagagggagaagcattttggttacattcattcctcaagcacttttttcagccccagaaacctaaatgatggaaattctcagacacaatcattggctccattcccacatccaaggacaatgccctccacaacccccgtttttttacataccttgtctaagactgaaatcagaggctccttctgtgataagaatcaaagttacaacctttatgtatgcaggttgtttataataaggcaaaggaaaataaaacctaagtattctcagcctcttcacctgctctttcaaagaaatctggagttgtcacttcccttcacagctcccccagcccctggcgctctccttcctggctcctgttttgaagatcaggggaagagaacattctcctaaggacagcagggtatccattgatataagaagggaaatccagaggtgaggggacagtgaaccaatgatacagcacaaggaggaccctgcaggacaaaagaccattagtattaagtgtttccttgtttgaggagttcagaaagaggagaaaaatcctgaaagagaaactgccaaggatatagaaaatactgaaaatgatggttatagggaaacagatttttttgtttgttttttgacggagtcttgctgtcgcccaggctggagcacagtggcaggatctcagcacatggcagcctccacctctcaggtacaagcaattctcctgcctcagcctcctgaatagctgggattacaggtgcctgccaccatgcccagctaattcttttgtattgttggccaggctggtcttgaactcctgacttcaagtgatccgcctgcttcggcctcccaaagtgctgggattactggcacaagccactgcacccagctaggtaacagaattttaaaagctttttctgtatattttgcagcttgtcccactctgtctttctctaaaaagacctcagtaagaaaattaatatccttttcctatttgttttgctctttataatcccgaagtgaataaagatttccattgcttttccctgtttattttttataatttcaaaatgccttgtgtaggatgacagtgattatgattattatcaaatagaatttacgtaacaatatcaggaactattcagtttcctctctcaaacccatccctctctttttatccctaaaactcttgcccacctttaatcttctgagctctccttgaattattgcacctgcctcctcctgtcctcactaaactcagtgttactcccttctcatctgtcacctgcaaaatagccaataaagctagcacaattgggcacaatttttaaggcatttgaaaattaaggatccagagcatgaaaacgggactatattttttcagccatgtttaaagtcatgcaatacttaatgaagtactacttgatgaaattttactaaacttattgttaaatgtgtagaagcttattttgagttttattgcttattagcaaagccagaaaagaaaaaaaatcactggggaaatattcaatcttccaaccatgagaaaaaacagctaaaataagacactgaaaacaatatggtgacaaataaaaatgcattcctttgttagcagattctgtctgaagatacagagaaaaaccttgctgaagatttgatgagtcaactgctaaaagaaattatttggtgtgtgaggtttgctatccagttgggtgcaagtatggatgcttctaacatttctttccttatggtatttgccacttgaaatgcagaatagttttttattttatactatagagtacatgtaatggggaagaaatattttagcaataaataacttcattatgaaagcaatattttatcaaataactggaagtggatctatcaatacagtggctgactgactggaatttactttttaaaaatgtccaagtcagattacaaagatcgctttggacataaaattcaaattgcattatcatgtcgatagacaaaaaaaattttcgaagctataaatgcacaaaaataattatatgttgtcatcaacaggcttaattttataagagaagatctttaaaatgtaagagaatatttacctttataaggaggtagagcgacattaaaattatttgtttaatgtaaacaagaatttaaaagagctgccagatttgaagttatctatttttcttttataaaatgacaagtatggcctggcgcagtggctcacgcctgtaatcccagcactttgggaggctgaggcgggcgaatcacgaggtcaggagttcgagaccagcctggccaacatggtgaaaccccgtctctactgaaaatacaaaaaattagctgggcatggtggtgggcacctgtaatcccagctattcaggaggctgaggcaggagaatcatttgaacacgggaggcaaaggtttcagtgagccaagatcactctactgcactccagcctgggagacagtgcaagactctgtctcaaaaaaaaaatgacaagtattccaagtttattgaaattactttctgccatgggagtgtctttcagtataatgtcatctggcagataattaaatggtaatagtagcaatgatgctaataatagtaaataataataaatataatctctcacttcaagattaaggtgacattttaaaaatgtggaacaaatatctgctatgtaaatggagcaggctatggagagtgtttcaaaattgggtatttaaaaacattcctttgttataagattttattgccaaaaacaatacaaacgcattagttacaagaactttcatatatacatcccttaaaatatataaacagcattgtttaatctgcataaaattctctaaacaaaacattatcatagaacttgaagtttctgcattaacatatggggaaatactttcctattctttataaaaccactaattggcattattgaagatagatattttctagattgcaataaaaactgttgcacaagagatgcataaaaggaaatggaaaaatgatgatgatgaggtaagcagagcctgggtgcccttcttttgcgttttggtctgtgtgccaattccactgatctattgctttgtaacaaagcacgcctgaactttatcattttctcacacagttacggtgcttggcctcaacttagtagtttttgctttgggtctctggtgcagtcacaatgaatggggctggaattatctgaaaggcttcttaactgtctgatgccttgtctgaggggactgaagtgactgaaatgtctgggtgctcgtggggcatctttctctctcagcagcctttccctgtggctagcttggctcccctaaagcatggccagtccagcatagtcagacttctcccatgatggttgcttttccctagagtgagagttccaatggacccagatgagtctctgaagtctctctctctctctctttctttctctttctttctttccttctctctctttctttctttccttctctctctctctttctttccttctctctttttctctctttctttctttctttccttctctctctctctttctctctttctttctttttctttctttctttttgacagagtctcactctgtccccaatggcgtgatctcggctcactgtaacctctgcctcctgggttcaggcaattctcccgcctcagcctctcaggtagctggaactaaaggtgcacaccaccatgcccagctaatttttgtatttttagtagagacagggtttcaccaatttggccaggatggtcttgatctcctgacctcatgatccacccgcttcggcctcccaaagtgctgggattatagccgtgagccaccacgcctggcctgaagtttcttataacatagatttgggagccccagaaagttaactttaccattctattggtcaagatctctaggaccagtccagatataagagaaagggaattaaactcaacttctcaatgcaaggagcatcaacagtacacagaaagaactgtacacagaaggaactgaagacagttatcaacttctgtatgaattggctaaaataccatatctaatagcacctgctactgttctagcatataatcagtgcttcgataatgtaaagaacatgcagtcaagtactctttaaaactcaagcacagcttgtgtggttatgatgactgattccttttcctgtttgctttaagatgcacagcctgacaggatttttattttctgtttggggaacagaatactaacaggtcatgtttattgagcatttctgacatgctgagctcttttcacaaatgattgaatttgaacccctccacaaacctttcaggtagataatctgtgtccttgaattctgcaaataagaagagtaaggcttggagaattttgtgacttttcctggatttcatagcatataagtagcaaatgaatgagaataacccaatttagctaatatcagtgactgagctctaaactgctatgtactagaaaaaaatctgcaaatataaatatattaaattatattttattatatattttatgaattataatttttaatttttactaattttgtattatttttatcctagtttattaaaatattccacataataaattatggtatattctttctatggaatacactgtaactatcacaaagaatgaggtaggtgcctatttatattttgaaaacaaagttacagatatatagatacatacacacagataaaatacacacacactaacatatatacagagaaagagaaaatttccacaataagatacatcagaaactgttacatgtagttaacactggaaaattggatttgaattttttgacagaactccattttttttttttactttattatttagcgtcatagcagatgctgtcccctccctgcccatattccctcagcccacccctaaggttctctacagccttgtctacatttcctatatacaatataggactttatatacatgaatgtggcttctgccctcaagccctgcataactttagtctctttctctctctctctctccctcgctcgcttgatctctgtgtctccctaccccctattatctctagatagatagatagatagatagatagatagatagatagatagatatagagatagatgatagatagatagatagatagatagatagatagatagatagatagatagatttatcttgctgtgcaggcttggggcagatcagcagtgcttggaaacaaaccttaaccaatgagggacagccgttatggatacattctctgacctctcagtgtgtcctcttcccagcgtgtcctcttcacagtctctcaggggccccagtgggatacagcaccggttgcccccagaagtgtccctctccttgtgcaccggttgctatttatgctatttatgttccctgcctcacttcccattccctcaccaagtgccctgggattacctcccagataaattgttacatcaggtcccttatcccagtatctgcttttgggagaacccaaaactaagacaaacactatttgaatttttgcaatatgctcacataattttcacacaaataggcaagcaacatcaactccagtttaaatgaataggatcattgaaaagtacagtatttaatgcagcgtggattgccctttccctgatgcacattctgggtctgttgccgtggctctgagtagcctttcagctcctaccaatagagaagaagagattttgagggccacaactgacgtagaggaaaagtggtctctgggcaggggggtctttccaataaggcttggaaaacagggtttcacccacacacaccatgttgtaaaaaggtgccatgttttgcttctctgtttcccaaccctaccccatccccagccatctttcgttgaacactgcttcatgctcatcactatgccgttaccaaggcttgctgagctccacacaggctcacaggctgggccaagagactccggggattcattgtctgggtctaacacagtgctctgggccctggcccaggggagctgaacaaagtcgtctcaagattacaagccatttcagccctatcaggggttatggcccctactttttaacatcctgcttttatttgcaggctatgaagtgtaatagttcaccattttggtttaagtatcaccataaaagtcagtgagatggaacaggcaataagtagttcttttacatagtgtggctgaggctgggagcttacatcttcattaacccacagaaacggctctggaataaaatgctggggtgggcgctccttaacgtcaacatctgtgaggacgaggccccctccttctaactccgtgtgccacactttgccccttgctggctctggtgctgaggaagttggaaaaacaggaaggaaaagagcagatcaatttcataagagcgattctgagtgtgtggatgaaacaccaagctttgcaatggaaagtgaaaaactcttctcaacacagatgtgtttgattagtaagacacccccagcaccatcctccaggcaccaagtactctgattagctgaagttccttatctcacaaaataagcatttccactaaaattagattaacaaataatacaaataattgtaggcttttgctgatggaaaatataagtgctcatgtcttccatccagaatctgtcccagagagatagagttggtaggcatagtacatacaataagacaactttattttacttagcagggtggcatgatatttgcctatatcagagtttctggtaagatttcctgcataacacccattctatggttttatgtgaaagaaaaaaagtttctcagtgaaacaatttgagtggaaatgttaactaaggacatttcactatacagaacttaagattcaaacagctaaatctgtttggtatgtatatgttggtatatataaaaaattcctaggattctcactgaacattttctcaaagaatatttcttggggttcagatttcatgcctcactgacataaaggaactgcccgcctcccacatcatgcatgcgcagaagattcagaactttaccccatccacaataacctaacatttgagcacaccagaatcaagaacaaaactgcactaaaacacaccacttaggttcccatcctaagggaaccttagggctgctctctggtcccatccttcttgcccaattctcagctccctacccctaaagtgataggataaggtttcatagccaagagatatattttatctcattttctttatagccgagccattatttcctacagaattattagtctacctcctttatcactctcagcccccaattccctatttccaattttacccaacagatttttttctaaaaatgaatagatctatccttgtcctacaaaagagatcattgaacataccttcttccataaccagtacttagtatgtccttaggatgcattcaggacttttctttcttttatataaattttcttaaggattaaaactcttcagagtggttatcagatttaatgggacctaaggaccacatgaccagaggacacccatgtcatgtagaagagatatatgcaactccttatttatatattcataccagacaacactaatgaatcatagaataatctccttcccttcattcctccacctccatatgaatccaaatgtttttctatgggagataaaacttattttccctctctatcttagctcttgctttctgaaaaaaaccagtaatcttgaaaagtgtttccagtctttctctttctcacatagatgaagtgatagctatgtggttatctctcacaaaacatgcatcattgcggccagagaaaccaattccctatgtcttgtaagctctttacagacatgcccatgttgaacagtgtctttcaagttgtcaaacatctccctttttggtccatagttacccttcacctgtatcatgtgtacatcatgaggtaatgaaggaaaaaagaacattattctccagttccaggggcttgagtcaagtgacactggagaagtttctgctctactaagtccatggctatgaaaagactattccttaatagtgctaaattgcaacaggacagtgcagaaaaccttgtctttggacacctaagagataatgcatgttgtctcaccagtaagtaaattcatgccaaacagaaaggggcaagtccattctttcatagcattaattgcaaaaccaatcttagtttatcatacaggcagctgcttctgtatcagcccagagtctattctcagcaatgggataacttgaagtcactcttgggcctcattgacctcttggaggtaaagaagagagctaagatggtagcctctgtcatccacacacagaaaagtcaaaccctcaacccagccatgataactgaacccttgaacacaccagaaccaagcactccacgacttgaacatacactcatcttcccacctggttgcagctgttgctcacatactgactcctatcttctatacctcctacttggctccttagctctaaatgataggatgagagatgcaaccaagcccccaaaactaagctcccataaaagcagacctttatcacatttgctctacatggctatatttctgattcactctcctccaccaattcatcgccctaaattccactttccctcaaatgtcccaacaatttttcattttctcacatttttcgcttttactttgttttcaaattttacatttctatacacttgactcactctccagaactattctgattattccattcagctgcggtgctttcatcagacttgtgttgatgctcccctgggcattctctggcctgtacttggggaccaggaagttgtttctttaccaaccatttatacaatttccagggatgttgctgcagccctattcttactgccaccttttttgtcaagaataacatttctaataaatgaatagcagcagatcctctccagaaaaatatacggggctctcatcagagtaccatcttattatcccttttcccaaagggatccctttgtgggcatctgtatcacttactatttttctttgcacttaaggaagcttggctttcgcatctttgaattattcctctggcacctttagatatgcaccaggcctcaaatgtgcagttagaatagtaaattttcccactagataaaggattaaatttgccacgacacatcccagattacccatatgggctggcttgtctccctcagtgtaagacactctgaaacacattgaagtccccaagatatgagtgtctaaatctttttgtgctgctataacaaaatgcttgagacttggtagtttatcaacaacataaacttacttctcacagttctggagtctgggaagtccacaaccaaattacccagaggttcagtgtctggtgagggctgttctctgcttccaagatggacacttgtttctgcatcctctggagcggatgaattctatctcctaaaaagggacaaaatgagcagacttgacttcccaagccctttacgatgcactaattaattcaagagcacagaggccttgtggcctaatcacttcctatagatcccaccttttaaaattgttgcattggggattaagttttaacatgagttttgaaggaacataaatattccagccatagcatatgagtaagacttagcctgttcccaatccttctgtgtcacagcacaacagatacccccttgaacttgtgactataactgtgatccattgccttgggcctcagacaacagaacagaaaactatcaagaccatgaaggtggggcaaagagcggtgggtgtccagaacttcaagcacgcaacatagtctttcttagattaacctcttgagacctccctagagagattacttttgttcctaggacacagttatcttaacagcattctcataactggatttcccatctacatttcatttcttcattctgtatggatatgccaccccaccagaggtaaatgtcctactgctgatttgtggatactttatcacttgatgtgcttctatctgtatccatctatttgtctgtctctctatttactaaatgatttacctgtgcagtattccagatgtttggaaatgctggaagtctgaactctgatttacagaggagatgttatgtaattcaacatgatttaaagtgtcacacaatctgtctatatttggaaatatctactctcctggcatcatgcagaaccagacacagcccaaggccttatgtttcctatttaacttaacaacctgcataaatgtctcttttacatattatcaatgtgtctttaatagtcttgcaattcttgaagcaatcccaatctgaataagcaaaatttttgcaggctgtggtatgtaaggatccaactggctcacacaaccaagtagaatttcaaaatacacatactagcccagaacagtgtctttcatgccttttgaagaacactcatttttaattgttgtatttgacatgtgttcaagaagaatggtctggtaagcgatctttttactttgtttttgtgttcgtttgacatgggatggggtgtggggtgtgatttactaagacaactcagtaaaatcctataacaataatgcgctttcttttttgtgcgatgacatattgttctccactctctctcagtaacatatctgctacaaatagtttctacaaccctccttgaaggcttccaacaaccacacagatgtctctatgcacagcattagctgtggaaagaaaaactgtgttaaagaagacattttccagttacagggaaagacagaaccactatcttagagtgaaagtaatacacggtgagtcccattgggatagccttggtgacccctcaaggcaagggattcagacctactggtatcatgtcatgtctgccaaagggatggctaccagtgagctgtaatatgaatggaactagaagaaaatggaacaaagaaacaagatggtcggaattattccccagaatgaataaaagtacccctcaagatcgcctatccctacattcattgaacagctttttaatacctgattcagtctttcctgcatgttaacaccatgaaagaagtggagaagatacttgataaaaagcagaagtaacttttacaccctaaaggtagaggcaactctgaaaattgattcaatgttctctggtttatacatctattgtttatgagtttaattactatgaattggttccatgagtttgatcatcagaacaagaaccaatcaagtcaatttcaggacatgcaaagttgacagagctgtcaatcaagggctcttttctttactctgaccaattggactccctctttgggggaatgtgaatcttgagcaaagtataaaaatttataaatcattggaacaaagtatttctggaggaaatctttgagactttccatgagtacctgccactgacatccctgaagatgtcctggtttctgtctttctcaaagcctggcagttcagctttttttttctttccactcctgtgagatatctactatatacttcataaactacatctttctatttgcttccatcagcctgatgtggattctatttcttgcaacgcggagaccataagtcattcaggacctgtaaggccttttctattcaagtaaaaatcgaggttcaaggaagccacaatttatttaactagatttcagatgcaggacaggataattaaccttttattagggaaggtatgagccctgcctcctcttcccccggcagagacaaacaattctcctcccaggcctgactgagcaatatgattatttgagcccacatgcatttgcacaggaaggagctgctggagcttgcccaggtggccaggccagcactgagtgctggagggcccaggaggagggctcctgcctcaccctgggcggtcgggtggaaataaactgtgtctaccgcctggttctggcagcaaaagcagcaccagcaccagaggaggttcggactccagaccccccgaaaccaggaaattccaagctggagctaaaattgtagctggccctcccagtcttgctcccagctcaatgctctgcaagcctcagcacagcatgtatccacacacaaagttacccacacgggttgaattatggaggcacagaactgttgaggccaaggccctctgtaacgctctcactctctgaaccctggggcaagaaggatccttcacccactgtttactttaatacttggactgagctggctgttaattttaaccgtggcatcagaaacagaaaactagcatttattattgtcggccagacactgaactagcgatttaatgaaattatctattcactctttccagcaatgcttctgtcaaagtaatattatccccattttacagaggttgcccagggttggttgatgtatgtgtgccaggtttgttggaatttgagctcatatcttttgtctctaaaagcctagttaactatttgatattttcttttttttttttttttttttttttgagacggagtcttgctgtcgcccaggctggagtgcagtggcgcaatctcggctcactgcaggctccgccccctggggttcacgccattctcctgcctcagcctcccgagtagctgggactacaggcgcccgccacctcgcccggctaatttttttgtatttttagtagagacggggtttcaccgtgttagccaggatggtctcgatctcctgacctcgtgatccgcccgcctcggcctcccaaagtgctgggattacaggcgtgagccaccgcgcccggcctatttgatattttctaactgatggaacacagagactttgcactaagattattctcaagtggcctttagaaatcataaaactggactgtaccactagacttttctattgatagagccaggaaatgctgttttctaggccaggagattttcctgtctgtcctggcaaagtccattgtcattagtaggattgatcagctcacaaaggatattacttgaaggagagactcctggactgagaaataggaatttaaacccaaccctcagctatgtctggacaacatggcttctaacacttacctcctttgtatcctcaacccttttgtttataagatggcatagcaatgtctactgtaacagcagtgtgcagttgtgaataaggcaatgacctaccaaaatcagggagggaggctatctgccctaatggagataagtttttatttcttacattgtcaagactctgaaaaaagggagggatttcagttagttttattattgttttcaaatcctctatggacagtgcaacccttgtaatctgcaagcgtgagatcctcccaatttttctacttctgcatgcccctagatcaagaaatttaccagaaaaatgcaaggctgctactagaaagggacttatagaccatgaacatcaaattgatcacttacaaatccagaaattgatacccttaaaagagaagtaacttatctaagatcacaaagtaaattagtggcagagtcaaggctaaagccaatctttctcacaggaattacagcacaaatgtaaggtggtattatactaatattgatggccgtaaaaagatcccaaatattttcaagaaacccaagcactaaactctggcccttggatggcatttactctgatggacgggacgttggatttaaattccaaagacttgtgctcaagtctttgggtactgataacctcctggggaaggaagacaagataggaatagttaattaatactgcaaggtagaaatgactgcccaagataccaacgcaagacatttcagaaagcagcacatgatgagttgtcaaattagtggagccaggagctaatgctctgagaaggcaaaggagaaccaccaccttgcctcctccatgaactccccagctctccctgcattcctgtggcttcttaagcctttaatcagtaacctgaacaagtgatttgcttgataattatatgtttatgaaacatgatatttgggggaaagaaaaagtgatttggagtcaatatacatgtctttacagctcatctttgccatctgctagttgaatgaccatgggcaagttcctttgcctttgagactacaccttcttttctgcaaagagaaaacaataatccacacttctcatgactgaaagttaaatgaaaaactagatagaaagcatcaaccatcgtgtttgcctcttgttgaatgtacttctttgtcttcggttagactgcaaactccttgagggtacgttcaggctttgtatgactcagcatctttcatggctccatcacaattatataaaaaaaaccttaaagaatataattggattgtttgtaactcaaaggataaatgcttgagaagatggataccctattctccatgatgtgcttatttcacattgcatgcctgtacaaaacatctcatgtatcccatacatatatatacctaccatgtacccacaaaatttttttataattaaaaaaattaaagacattattgatttgaactaactcaaacatagtcaggagagaggaggagaacctatcttgattttttaaaaaagaagaaggttggatttatactacctttcactgagtatcagccagagtgtgagctgagttttcttaacaattgatcataacttgagtccattgtggggcatcatcagttcaatgcatggtggtgccaataacctaagaaaaaatacttccctaaatatcttgaaacccacatgattttactggtgaccgctttaaggcttccatatgataagctccacaacatattcactttcaaggggcatgtaaactgatagaaaaccacacaaaaattcagtaaaatcctcatggcaaaacctgagtcacccaaaagaaaactaacatttatcattacagacataagtatgctatagcaagattaggtacaagtactgaatagcttatgaaaataattatatttattatcataaaaagaatgctttatcatatgcaacaaagagttctatattggaagaaacacacattcacagatctctgtatacagatatgtggataatattttccacgtacacacatgtcccaatatattttccacattttctacaattcccatcataaccagaaaataaattcatgcttattttccctttaccaaatcaatctagctagatagctggctagctaccgctatctatctattaactatggatcatcttaataaagagaaataaacttgagtttgctttctgattatgatgggaattgtggaaaatgtgggggaaaaaaatgaaatttttaagttagggtccaaacaggagacaaaaaccacacagcaatttgaacaggaaatgttgaatacaaagaattattaactataacatggaattacctacaaaaagcgaagagaattccaaacaacaaatgaatggaagaaaagaaagcagccaccagctctaggactaaggcagagaacccaaggaaggaacaaatatggaagacactccctttccagagttgacatccacatctggatggtggctgtgctgctttggcccactggatgagggaagagttccctgaggtgtgcacctctggggtgctggaggaagccgcgtaggaaaacgtcatgccccgggtggtagtgtggctgaaactccctggaggtgtgtgccactgggtgtcctgctgcccgcctccctccagctgcctccagccaggggagcaagacagaataccggaaccaggatgaatccctcgtcccagtccagtgtctctcctgcgccctctactgacaaagtgtatccctgtgtccacaagcaaaggaaaagtactcttgtcccaagcagggcaatgaagggtgaacgtgaagctaagaggcaaaagttgataacagcacatacaaaaaaatataaaaacaaataaataaagatcaccaacaatcccaacaaccaaaaataaaatcttctactgatatttcaaaaaatcttctataacctgtatttacttgggaggggtaatgtctttacatattttttaaacaactaagaacatgtgttaagtcaatttaactaagtttcttttcaatttatcataagatatgttttataactaaaaattatctttcacatgatttttattgggtgcataatattccacaagggaatacttatttaagtattgttctatttttaagtatttacatttttatttttttctttattacagataatgtatatcttgaataaattctttaaaataaagacccacagtagattttctggtttcaagtttcaaccatatttaagaatcctactatatatttttaaattgctcttcataattataaagccaacttatatttccacagaagcatacgtgaatgtccatctcatcacattctcatcagcaaggagtagtaccacatttaaatatgtattgttagatttttaaaaatatacaagttaattcttacatttttgatcactagtaaagttggcaattttttacatctttaagttccacttctgaatatttgttttagccatcttcttgaatttttggtgtttttatttttaatatgtaaaaagtaaaaagctatttgttaaaacaccaagacaattaatcaaaatattacagtatagaagtggaatgatacttttaactatgataaagggtgattttatcacacacaacaaattgggtagttgtgacaatgatacaaataaagagtttattttacatttttaaattttgttatatttttcgtataaatatatattctttcttataaccaggaaagctatatcttcaaaatacaaggatttattttttccaagttatatccatgaccatatttaatggataacaccagaggtatacctgctaaaaatcagcaaaaaagaacaatgtccactattattactaacattgttgtggaaattgtggtcaagggagaaatacataaaaaagacagaaaaggtgtacataaaggtaaggaaggacgaaatcattattcattcactatataattccaaatataacacagaagcatttttgtcttaagaaatattctaaggtctgtatgtaaggatgaataagtcacagtccgatatggtttggctctgtgtttccacccaaaatctcatcttgaattgtaataatccccacgtgtcaaggatgggacaaggtggagataattgaattatgggggtggtttcccccatactgttcttgtgatagtgagtgagttctcatgagacctcatggttttataaggggcttccccctgcccctttgctctgcacttctccttgctgccgccatgtgaagaaggatgtgtttgcttccccttctgccttgattgtaagtttcctgaggcctctccagccctgcagaactgtgaatcatttaaatctctttcctttataaattacccagtctctggtatttcttcatagcagagtaagaatggattaatacaccataaaaaagaatatttgaaaagaataattgataaggaggtggactaggtggtaaaccaaagaaaattcctccctgtatgtactaaggcttaatatcaaacaaagcactgcagatcattgggaagtgaagaattatgccataaatattactaagatgaattaacagttaaaataaacaatttctgtcctctcataccatataccaaaatacattttacatggattaaaatgtcaatgtgaaaagcaaaactgaacagttgtatagcatagatttactaatttgttaaaaccttgaggtaagtgacaagaaattggaaagctataaaagtaattgaacagattaaatatttctatgtatcctaaatatgtaaacttttaaatgtagaatgttatgtatcatgaaagtattcatgaagtaatattgcagatggaatagttttacatttgtttggttaataacatagataaatcaataagaaaaacataacaccgttatagataaaagggcaaagaacatgaatggaggactattcactaaatatgaactagaaccattaagtaaaggtgagaaaataagctaaacctcattaataatccaagaaaactctccctgtggtgaaagccaaaactgagcatctgcttgtcaacaagctagattttgttagaaccatctgagttactactcaaataactttcagacaatggcaaattcctcaactccaaatcctgtttttcttctaataagaatagttgtaagtcataactcctcaagtgtgtgtgtgtgtgtgtgtgtgtgtgtgtgtgtgtgtgtgtgtgtgacgaggcgaggccctaaataggcacccagacacatgggaacctttatttcttgacctttgtctctcccagggtagcctctaacaagatggcttggatttgttttgaaatgtcttctccagagaaggattcccaagaggcatcatgtagactaaacctttggagctgcttggcacaatgcctgccatggtcaggccctgggaaatgctgcagagccctgcaggggaggtgagactcaagagagagacccagccccaagcccaggactcttaatttatgtttctgctctggcctcagtgctgtgaacaaagaaactgatgggatttatttaagggagttgcctctcccctcccctcaacacccatctatcttccggaatagtggaaagagtgctagatttggagaatcccagttccttcagtttctgaatgttgaccttcttatctagaaaatggggtcagtaatttcttccttcctgttgctggattattgggaaaaatgtggttaatgtatagtcaattacgcaagatggttcagcctttgagacaaaccagacgttttggattcaaatcttgtttctgcaactttgcatccttgagaaagtttgtttaacctctctgtgctcaatttcaccttctgtaaagttgagattatttcttgaagaattattataggagttaaattacgtaatacacccaagcattgtagcaagacctggaaatagtgttattattactagtgctcccagtttagaaattcttattccagcattccttcctacattctcttcttaattcaaccctgtctaactaacatgctctctttcccatttctgccaagcatcgttttatattttatattctttcgatatttgatgccatctgacataacgaatgacattttcctagcataattgtcatgtatctgaggtccaggaccacattcactcattcattcattcatttattcatgcagcaaatatttatctaccatctacagtgtcccagaccttgtcctagactcttgaatacattcatgacttcaagtcagtcctgatcatttaaatcctagtgttcaagttctaacttggaagtcaggcaagtaaccaaatgatttcaaaaccaagtcataagtagataatagagtaaagaaaagaaccttatgggaaatagagctggatgggattcactcttgctataagaattagaaatcctccactgggtcatctagccagggatctgaatgtacccagcaggcaaaagagagaaagagtaccccagatcattagaacaaaatgttaaaaagcatgaaggtgtgaacgtgtatgacctatataggaaaggtgataaaggtgactctggcaaaagtatagggtatgtgagaaaaaaaaagaaagagaaaaaggaaaaaaaaatggctacaagaagtcagatggaaaaaaaaaggcaaggagaagaagagacttgaaaaactgggttaaggagtttggacattttcccagacattcagggttttcaacatgtggccaccaggcggtcctgatctagtcaggtctgtgcttttaaagttttcatggaatatagggcatgtactacctatttagccacagaacccaccatgccataggacagtacccagcactgaatcttttcccacatgcccctgatggatgtaagtttgcaaccctgcttagtcttagagagttgttaaagagttgataccaggcattgattttatccagtccctctggagactggcaggagaggctattgtatgtagaagggatgtgagactataggaggaaagggcagctaaaaaaactaccacaattaaatgaaaatgatagaaattatgtttgcaaggatgtagactagctaaaaaaagtcatacattataacttcaggaattgtcaattggtataaccactttgcaaaactttttagcaatatttattaagctaaacatctgcagaccctatgacttaataattttatttccagacatatgcccaacaacgctgtgtacatgtgtgtacacaaagtcatgtacatgtgtgtatataaagtcacgtacaagactacacagcagcactattcataataacttcaaactggatactgcccaaatagagagtaggtggtggataaatatatttttgtatgttacatataacctgagcacggtataattatgaacaacaatatggttaaatcttataacatagtattaagtgaaggaagacaaactgaaaaggtcacatgctgaatgaatctgcttatacaaggtacaaaaacaggcaagactgaaagttgctcttaaatgatgattacctttggacaggcaccagtgtttgtctggaagagggcaacaagagggcttctgggaagctgataatgttctatttcttaatttgaaaactggtttcatgcatgtgttcagtttgtaaaaaagtattgagctggaataagtgtgtttatgatatacgtatctttctgaatatacttcaattaaaaagttttacaaatttaaaaaataagttaaaggtcatcacaaataatattattgcagtagacagtgagaattaatgagacctgtaccagggaaataagtgttgtatttactcatttgtttatctagtcattcattcaatttttattaagagtctgttatggatcaaacgttctactaggtgttgagcataccaaagctacacggagaagagagatattaaacaatcaacctctcaactaaataatttcaggaagaaaaaggcaattaataagcaaagcaaggtgatgagatacagcagaaatggatagcagtaggggatgttggagaggagaggctactttagacaaattagcaactgtgtttcccccatctcaggctgctaggactaagcacttctgcacagttagtggtgttaaaactcctaggattcttgttccaatgccagcagatttttcgtcttgctgatggtaaagcaggattttgataaagcttccttacaaagggtgtcacatgcaataatgtgtcatgatcaacatgtcacagcacacagcaccaggctggtacgatctgacgatccagggctcataataccattattgggcactgggaagtgtattttgctgtgtcttgcaaaatgctcaaagaaacactgtctaccactccttgacctacgttttataggatccttagttgtctgcctccaaagtggaaaatattccatgggtaccctgatagcatatttaacatgcctttcatctcaacatttgttttctggattgttgctccatccaactccctggcacttctgaacataattggtattcctttgttaccaagactttttccacaaactttacttttgaaatatttcttaaaactttttttaatttttaatattcaaataatttcagatctcacagttagtccaaacatcccactaaatctgatatgagttagagagctcattggaagaaaagggatagaacatatattttttaagaaggaccaacattaaaattgaaggtttttgtcttctattaatatcactggagcctctaaaaataaatgtgctatataaatgtaaaattctcatcacaatttttcatggcagaacatgtagtaaagacaacttgaaaatatctcagctttacggaaggagttattgccaggtttgattttgtttaatcaacactggccctccagtctatccttgcatctccaaagcctacatatttggaggacccaccttagatactaacacttgtagaaaacctttcctgataacctaagccaagagtgctttctgccagctaaactgctgtacctgttatttatacctttctcacaatcaactgtgtggtgacgtgtctagctctctacctggctgctgggtgtgagtgtcttgatgtgtttaagttatctctgcatcttgcacaaccacagcatcatcaccgtcatcatcaccttcaccagaaatacccactgagcacctaccctttgtcaggacttagctcagtgctttaatagccttatcttatttaattctccaaacaaccttattactactcactttttacagatgaagatatgggagcatggagaggctaaataacttcttcagtttcctcagtgttagaactaaaactccaggaatatggctttagcatagactcatacctgtggtgccacggtgcttcttacctagcaaaaacgaggcatcatggaagttcataaacacccgttcaatacattggccctacggcatgagagtggctgtgaattagtttgggcagaaaaacacaggaagtgagtcgagcctcacggatgttttgtggtgagtttgagaaacattgagggtcttcatttcaagatgaccagtgacctgtttgcttaactggggtctgtgacaaatactctaagcacctcatgtttcccgtgagcatgacaccttcaatcaaatgttcacaaagccaccgtcacatgtaatgcccacccagctgctggtagaattccccgagtggtacactgtgaagacaggtgggattctcgggatgaaaaggatgcacacttaagcagttggcagagatttgctttctccattccctttattaactcccattgacttccattgtaaaaatgaagatgcattcccatgggataaaacacttggcctcaccactagacaaaaatgacctgtacgaaggaaacaaacccctttcaatcagctgtttaaaggaaaaatgataatggatgaaagaagttgaaggaataatgatcatgatctttagaaagcaatgctaaactacataaagcagaggcagaaaaaaaacataccttttagaaaaaaaaatgcggagacagtaggtccatgaaaagaattgaagcaaacatggacgttcatttattcatttactttttctactcatttattcacttattcagcacatctcactggtttgtgctgtttgcgctctgttctacatagaggagagaaggacaaatgagaagatactcaagaagtgagacacaggagtccctgtgttcgggtggatatgaaggtgttacagcacagtagttatgacgcagattttagcatttgggaaccagcatagcacagacttgggactggaatcctgttctccagcttatcagctgttgcctttagcaaggcatctgacctcactccacctcagtttccctgcttgccatgtaggaaagagtttctgacatgaaaaagttgttataaggatttgtatttgtatatcacttagaactaaaaagcaaatgctgttttaccatgtgttatctgaatgagttggagcaaaattagtttattcaactgtaaaataggtaacttgtacatctcaggataatgaaagttatacacatacatatatatatataaatatgtcacatacacacacacacactgaaggaattcagaacatgccaccccaaaatatgttgccctggcatattgactattctgagttaaaggaacttgaaaaaccgcagatccaagaaggacactctgatcttccttccatctctcaaaagagagagatgaaggccggacgtggtggttcatgcctgtaatcccagtactttgagaggccaaggcgggcggatcacctgaggccgggagttcgagaccagccagaccaacatggagaaaccccatctctactaaaaatacaaaagtagccgggcgtggtggcacatgcctgtaatctcagctactcaggaggctgaaacaggagaatcacttgaacctgggaggcagaggttgtgatgagccgagattgcaccattgtaccgttgcactccagcctgggcaacaagagtgaaactccgtctcaaaaaaaaaaaaaaaaaaaaaaaaaagaaacagttctctaatttgagaactgtccccgctataccaagagaaaggaaacattcttatcatggaggacaggaaattgagaccaagagaattctgtgcaaacagatccttgttaaaataagtcttatcttcctttagccttgccaccattgccctttttttgttcaacctagtataagagcgtttaggttttgccaggtctttgagtcttcatttcctaatgaggtctcctgtgtcttataaaatttatatttaaaattggtatgcttttatcctgttaatctgtcttaagccaaattaattctcaggcccagccagagaccctaagacagcagaggcaacaaagttttgcttcccctacaatatataccatatataaacacacatacatacagagatgtgtatgtgtatgagggtgtgtgtgtttgtgtgtgtgtgtgtgtaaaatacattatataaatacagtcattggccacctaatgatgtttcagtcaacaacagactacatatatgacagtggtcccacaagattataatgaagctgttattgtccctggacagggggacagtaattttgttgatctcaacccggtgtagggctaggctaatgtgggtgtttgtatcttggggtttttttttgtttttttttttaatttgagacagagtcttgctctgttgtccaggctggagtgcagtggcaccatctcggctcactgcaacttctgcctcctgggctcaagcaattctcctgcttcagcctcctgagtagctgggattacaggcaggcaccaccacgcctggctaatttttatatttttgggagagacagggtttcaccatgttgatcaggctggcctcaaactcctgacctcgtgatccacctgccttggcctcccaaagtgctgggattacaggcatgagccaccacgcctggcctgtattttactttttaatgaaaacgtttaaaatttttttaaagttaatagaaaaaaatacaaagatctaaataaagtatttttgtacggctgtacaatcggtttgtgttttaagctaagtgttcttacaaaaagtttataaaagttacagtaagctaaggttaatttattattgaagaaaaaaatatgattgtatgaatttagtgtagcctaagtgtttggtgtttataaagtgtatactctgcacagtcatgtccttgtctttcacattcagtcaccactcactcactcactcactcagagcaacttccagtccagtaggctccttttatgattagtgctttatacaggtgtaccattttttatcttttatacgatatttttactgtaccttttctatgtttatatatgcttagatacatgaatacgtaccattgtgttacaattgcctacactattcaggacagaaagatgctgcagagatttttaggctaggagcaataggcaatgccatatggcctggcatgtagtaagctctgccacctaggtttgtgtaaatacactccatgatgttcacacaatgatgcagtcacctaatgacgcatttctcagaacatttccccatcgttaagcaacacataactgcatgtaaacggcttgacgcagcatcttacacccagcaaatactcaagtggctaaatggtaagctctaagacaagctctatctatatacctatgtatgtatctatctaatttatataattttattttattaatatttagtgggaaatgagagaggagataacataatttttacacattaaaaaaaatttgtgctaagcccctattatgtacaaggcactgggaattcgataatgaaaatgacaagtgtggccactgacctcaagggtacttatagtcagtctttctggactgggcagatgaaatacagatatgttcagatacagaagactgggggaaaagaaacttggtggaaaaatgtattaggtcagttaggggcatatgagggtaagaggaggagttgacaggaacatactcaggtttgaaatttagagtgggggaattggatttattatagatttggaggttatcaggagttggatggtggaagatgagatcacccagattgaacaagtgtagtgagacgcaattctagcttaaaaacagaactcttgataactcaaccattttaaaatgcaaataaagaaaaggatccaatgatgatactgagggggaaaaaaagttgaaaaaataacagatccaagattctacaaaaaatacagacagaagggcagaataatcagggtcatgtggttgcagcctaggaaagcaaagacatttatcccagcagccaagagagtcacacaggttttgttacatacttgattttacagcaatttaaaaagccagactttgagacacttcctatatcacgaggctcttgctgtccagcagaatctcatttcctgaaatttgtgcacatttggctcctaataactcctcattttatagtttacaaagagctctctcacatcttgactaggcctcaccactgagaatcaggcaaggtctgatcattatctccacttacagatgaggaggaaatgggttgagagaggcaaaagcatgtgtctgaggtcttgcagatttattgacatcctgcaacacactcgctattctctccctgaccctggccttggagaattgtgtcttctgaaatatattctcagaaattatgctctataccggatcttagaggggcattttggatccacataacccatgacatatggaacattaacttccttaaatctttttggaagtgaataaatagcaaaatgagtagggaattaaaacagatattggggcattttcacagtgatggagagacaaaggcagataaacacatccctttgtgtcattacatcccatcctctcctcctaccccccaaagacagagcaattaggctgagtttccagggattgcctggcctgtgtaggtgctgcgcaccctccatccagtgacccagtacaaatgccgtctctcgcagcttcacagaccgctgctgctgacttaggcctcggctctgactctggttcccttcctcctgcctttcagtcagattttcccatttccgaagtcaacagcttccccaaagcaatgggacacaggacgtcataactcagacgccaaacagcaggagccaggagggagggaagaaaggaacacaatggaaatgggtctgcagaggctgcgcagaaggaggactggagtgggagtctaggggagattaaagcaagtgcgtgacgctgagcattgttgggcacaaaagccactgtgtttggtgtccagttgatatctcatgtttaaagtccggggtgtatgcacagaaggtgggatttagaatctggacaatcagactagggggttggaggagctaaaaccagccccttcctggacagagatggtccagaggtgggcagaggcaggctccaagaggacactggagtgctgcccagtaaactgaggcctaagcacttgtgaatgaatggagcccagaaaaaaggtagcagatgggggaggggagcagtttcaggctgcacaccaatgcctcgatgcaaaagacaccaaggacctggcagcagactcctttctctttccacaacctggtgggcctgtgaggttgctcaggttaccttgtatctagtagcagccaggtctcagctggaagaagccacaagtgaggaggcagggcctcagagaagagcaggggccagtcattcgaggcacccaaagatgtcctggaagggagctggaggatctttctagaactcccaattcaatgtgttgaggtgtctcagtcctgtttcacaggacttttaaactaatatggcagacttttggctgattgtaactgagtactttaaattatgtagatgactatattttttttcacttaaaaggtcagttcttatataacttgcctcattcttttcaaaaaatattttcatatacccactaaatagaatatatagaaatgtatgcataaagcatatatacacacacaaagaaagacaatcttcatatagaaaaaatataatacgcattcttaagtgtactcagcacccagatccagaaatagaacataccagcaccctagaagtcctgatcatacttaactcttaatttaaaaaaaattatctcagcaactgccaaccccaagaaatacctttccaatttaggttgaaaacaaataaggaactgcaatacagtacgtgggttttcactctgtggcacactttccatacagatctattctgcaaagggaattacacctcatctccagctcacccaagaaagcccatggagattcacgctgattacacaaaacggatccatagcattagcagtggctgttctgctccatggtcgttcagaagtcagccctgcgtctgactgaatggcctgagtcctttagtataattactgtcgtgtacatcttccttccaagctctgcagcagcagccagcgtggaaggggagatttccacaaccagcacttatttctgtccatgcagtttccagtggaatacttagcagcatttcctccacagggcagggcaccttggaattactgtctgcttccagggagttttgagctcagagtctctgctggggattgggatgggacagggagggtgtacaaacattcctctgaagtagtgcacaagattttcagcatttttcgagggagcgtctcaaagttacacaacatccccacaccctgcccttccccctaaaaggttaagaacctctttacttgactatgagttatctgagggcagaggcattgattaatcttcttcaacctgtatccacagtgagatttttttttctgtattaccagccatcagcctgtgtaactgaaaaaagctaggaatttggggtcagacacactgtcatcctccgtgtaactgagtaaatttttaaactctctgagccctcatttttttcatcagtagagtaactataataatgcccactacactgtaacattatatatgtctgccagagtgcttggctcattaaagaatttctgcaaagtccagctatcctatctccctacctctctgataaatccagagcaagctgagatgggaagaaaggttgagctcacagttatccggatgtttcagactcacaaccaatatgaaattgaggctggccacgggatggcaactccactcagcatagccacggagtagcagtgagagcactgtgtcccttgatgttcagcccataactcttcaaaaggccccttcttggtagccctgatcagttctggtgtgcagtctgtcaagttctggattgccattttagcacggcacccatgttttgagagcaggagcttggtctgattccaccactgcacaaggctaggcacactgcaggtgttggataaatgccagctgaatttacagattttaataatgaagtctacggctcaatttaactagaaattataagtaaaatagcatgttaaaccctatatagttctttcgggcccccagaggaaaggacaggtagctttcaacagactatcaaatggagagaaatgttaatctattccttaataatctccttatgtctttatatgcaaaaaactccccaataggtgtgtgtttcaggggaatcatcagaccctcctgctcaacgcctattgacttacaggtgctaaatacccagtaagttgctctctgttctacttaacaaccacctaattcatccactgttccagacttggaaagagatgattcttgtcctgaggttttctccaacagaaagggaagaaagtacatcagttaataattcttagtatttgatttagagtttcaagtctataaccatcaagatagcaattctaagaggcaaaaaggcaaaaaaaagtagtctgtattgaaagcaattataatggccacaataatatcaataacatctaccgtggatgaacgcatttgaaatgcagagtaaaggactaatcatgaatcatctcattgtattttctcaagaaggaagtaaaataagcatgactttatttccacttctcaaatgtggaaacttgatggagagaggtcaagtgacttggccaaggacacagttacaaagtcaaaagtccagcctagatctacctgattctacagcctctgctgagaactgaaaccaaagtcaggcaccttgtcatacatcaatatcattaatggtgccaggagtagactccattattctgaattcctaaatccaaattttacacattgagaggatctgtagatttgcttctacagctgtatagattatccaattctgatttttaagtcaaatcacacaatggctgggcaggcttccccaaaccctggcaaagttttcattgcccacaagatggcgttgaggggtgaatgaaaaacctccaggcatggatgtcctatgtgcaccattccatcagaacataaatgcactggcattttccagcaagatctgttaacagttttggaccaaggaaggagaaggggcctcgttagatctatcactatccagtcatgtaccacgtcctgcattaacgctttgcatctgtgactccaaaacaaagtctcagaaactccctggtaggtgtggcaagtacgtgacaatatgctaaactaaactcaattggtttaacctccagttccttaggagtcctgggcataccttccttacttgaaattacacgtaaccttggttggcacacagtaggtgcccaatccgctgaagaattgatgaatgatgtttcattcaataccttgaatgctggccttctctggataaggattggctaaattttacatccagaggttaatgaagctgtcattgagagttgaggttctgaggaagaaagactaaggtctgctggaaagacacctggaccgtgagaagcccaggtgtgcaactctagttctgagccttagaacctttgaacaaatcactgagtctcaaggtcctcatctttaaaatattcatgtttgccctgcatagtttctattgaaataatcaaatatgctaaggaatgaaaattgctgtacagaaaaatgtcactattccaaatgtaaaattctatactcaggaagggagcagttattgccttttagtaggtgacactaaagttggtcatgcattaagaatctggagtcagagctgaatctcagcgacaccatttactagtagtgtgaccttaggtaaataatgtaactctatgacccacagtttctacctctataaaatgggggtaagaatagtataagcttcttggagattaggacagaggtaaaaataaagtatttatcaaaatgcctagcacatagttaccatcaaaatggtactaatcataatattaatattatgtgtacaacttttaatttatgtatatcatgagttatgatattttaaacatagctcttactgactcccatgagccaattgcatgcatgtcttttcaactttgtgttcagcagcaatcacattggcagcttgaaaatggctgtagtaggagttatttacactactactatagttgtgtagtataattgataaatgctacaaatcagaattgttgtttattgttgttttcattttcttccagagaatcaatttatcagtatcaaccaggcgtggtggctcctgcctgtaatcccagcgctttgggaggccggggcaggtggatcacttgaggtcaggagtttgagaccagcctggccaacatggcaaaaccccgtctctactaaaaatacaaaaattagccgagcgtagtggcgcatgcctgtaatcccagctacttgggaggctgaggcaaaagaatcactggaacccaggaggcagaggttgcagcgagctgaggtggcaccactgcactccagcctgggcgacagagagagactccatctaaaaaaaaaaaaaaaaaaaattaccagtatccttttggttatgcatattgaatgtgtcttagtttaggtctcctagaagcatttcctaagctgagattcatatgtaattgagctattgaaggagtgcccccaaataaaacttgcaagtgtgtgagggaagccttatagggcagaggaagaaaccgggcaaaggtgagggtgcagctgaagtctagtctcagcctcattccacaggcagctctggagcctgcgtggaaccacagagttcccaccttgaggcaagggtgccaaacttttctgcccttgtgttagttggccattggctactgacagacttctggagagaatgcagcttcccaggccattctgggtggcacagctcctgatagcaagtaattctctgaagggtccagctgtgagtcaagaacatctagcactgatgagacatggatgcaccagcccagcaaagggcagctgagcagggcaccaacagcacctactacagtatggaaacagattgtcatactagacatttgaactagaatagatttgggaagtcacctctcctatgtgtgtaatccaatacagaagagttgcttattcaatcagcaaatatttatttagtgtaaactacattcctagtaatgggattggtactggagatgcagggctgaatgcaatcagatgtggagtcccggcactggaggagtttacattccagctatggagacagacattaaccaaatgctcccacaaataaacacacatttacaactgtgatggttactgtgaaagggacaggaaacatagtactcttctgtcaagacaagggtttgatagacagggaggccccagagagcttccctaaaaaagtgacatctgaactgagatctgaaacatgaactcactaggtgtgggagtaggatgaactagaagtgggaggagctgacagtagacaggtaagtgaaccttcccttggactcatctccaggacaagcttgcgtatggagatttgtccctgaggcccaaggagtgggatggctcctggagaccacgggggtggggaaatgaggaagcaaggagagttatctttactcttctgagaacagtacttagaaggcaggccaacccttttctatttctactaatattctagaattctctattttgaaaacaagactatttttatcctctgtcagtcctctgagcccaagccaagccatcgcatcccctgtgacttccaggtatatgaccagatggcctgaagtaactaaagaatcacaaaagaagtgaatatgccctgccccaccttaactgatgacattccaccacaaaagaagtgtaaatggccggtccttgccttaagtgatgacattatcttgtgaaagtccttttcctggctcatcctggctcaaaaacacccccactgagcaccttgtgacccccactcctgcccgccagagaacaaaccccctttgactgtaattttcctttacctacccaaatcctataaaatgtccccacccttatctcccttcgctgactctcttttcggactcagcccacctgcacccagatgaaataaacagccacgttgctcacacaaagcctgtttggtggtctcttcacacggacgtgcatgaaatttggtgccgtgactgggatcgggggacctcccttgggagatcaatcccctgtcctgctctttgctctgtgaaaaagatccacctatgacctcaggtcctcagaccgaccagcccaagaaacatctcaccaatttcaaatccggtaagcggcctctttttactctcttctccagcttccctcactatccctcaacctctttctcctttcaatcttggtgccacacttcaatctctcccttctcttaatttcaattcctttcattttctggtagagacaaaggagacacattttatccgtggacccaaaactctggcgtcggtcacggactgggaaggcagccttcccttggtgtttaatcattgcaggggcacctctctgattattcacccacgtttcaaaggtgtcagaccacgcagggatgcttgccttggtccttcacccttagcggcaagtcccgcttttctggggaaggggcaagtaccccaaccccttctctccttgtctctaccccttctctgcttttctgggggagggacaagtacccctcaaccccttctccttcacccttaatggcaagtcccgcttttctgggggaggggcaagtacccctcaaccccttctccttcacccttagtggcaagtcccgtgtttctagggggcaagaacccccaatcccttatttctgcaccccaacctcttatctctgtgccctaattccttatttccatgccccaaccctttctctgcttttctggagggcaagaaacccctaccgcttctccgtgtctctactcttttctctgggcttgcctccttcactatgggcaagtttccaccttccattcctccttcttctcccttagcctatattcttaagaacttaaaacctcttcaactctcacctgacctaaaatctaagcatcttattttcttctgcaatgccgcttgaccccaatacaaactcgacagtagttccaaatagctggaaaatggcactttcaatttttccatcctacaagatctaaataattcttgtagtaaaatgggcaaatggtctgaggtgcctgacatccaggcattcttttacacatcagtcccttcctagtctctgtgcccagtgcaactcgtcccaaatcttccttctttccctccctcctgtcccctcagtcccaaccccaagcgttgctgagtctttctaatcttccttttctacagacccatctgacctctcccctcctcgccaggccaagctaggtcccaattcttccttggcctctgctcctccaccctgtaatctttttatcgcctcccctcctcacacctggtccagcttacagtttcgttgtgtgactagccctcccccacctgcccagcaatttactcttaaaaaggtggctggagccaaaggcatagtcaaggttaatgctcctttttctttatcccaaatcagaagcctttaggctcttttttatcaaatataaaaacccagcccagttcatggctcgttcggcagcaaccctgagacactttacagccctagaccctaaaaggtcaaaaggccattttattctcaatatacattttattacccaatctgctcccgacattaaataaaactccaaaaattagaatctggccctcaaaccccacaacaggacttaattaacccatcttcaaggtgtacaataacaaaaaaaaaagttgcaattccttgcttccactgtgagacaaaccccagccacatctccagcacacaacaacttccaaacgcctgaactgcagtggccaggcgttcctccagaacctcctcccccaggaaattgctacaagtgccagaaatctgaccaccaggccaaggaatgcctgcagcccaggattcctcctaagcagtgtcccatctgtgtgggaccccactggaaatcggactgttcaactcacctggcagccactcccagagcccctggaactctggcccaaggctctctgactgactccttcttggcttagcagctgaagactgatgctgcctgattgcctcggaagccccgtagaccatcacggacgccgagcttcaggtaactctcacagtggagggtaagtccatccccttcttaatcaatatggaggctacccactccacattaccttcttaagggcctgtttcccttgcctccataactgttgtgggtattgacggccaggcttctaaacttgttaaaactccccaactctggtgccaacttagacaatactcttttatgcactcttttttagttatccccacctgcccaggtcccttattaggccgagatattttaaccaaattatctgcttccctgactattcctggactatagccgcatctcattgctgcccttcttcccaatccaaagcctcctatgcgtcctcctcttgtattgccccaccttaacccacaagtataagatacctctactccctccttggcgatggttcacgcaccccttaccatctcattaaaacctaatcacccttaccccactcaatgccaatatcccatcccacagcacgctttaaaaggattaaagcctgttatcactcgcctgctacagcatgggcttctaaaacctataaactctcctttcccttcccccattttacctgtcctaaaaccagacaaggcttacaagttagttcagaatctgcgccttatcaaccaaattgttttgcctatccaccctgtggtgccaaacccatacactctcctatcctcaatacctccttctactacccattattctgttctggatctcaaacatgctttctttactattcctttgcacccttcatcccagcctctctttgccttcacttagactgaccctgacacccattaggctcagcaaattacctgggctgtactgccgcaaggcttcacagacagccgccattacttcagttaagcccaaatttcatcctcatctgttacctatctcggcataattctcataaaaacacacgtgctctccctgctgatcgtgtccgattaatctcccaaacctcaatcccttacaaaagaacaactcctttccttcctaggcatggttagtgcggtcagaattcttacacaagagccaggaccgcaccgtgtagcctttctgtccaaacaacttgaccttactgttttagcctggccctcatgtctgcgtgcagcagctgccgctgctttaatactgttagaggccctaaaaatcacaaactatgctcaactcactctctacatttctcataacttccaaaatctattttcttcctcatatctgacgcatatactttctgctccccggctctttcacaattaccattgttcctggcccggactttcacattattcctgataccacacctgacccccatgactgtatctctctgatccacctgatattcacaccatttccccatatttccttctttactgttcctcaccctgatcacgcttgatttattgatggcagttccaccaggcctaatcgccacacaccagcaaaggcaggctatgctatagtacaagccactagcccacctctcaggacctctcatttcctttccatcgtggaaatctgtcctcaaggaaataacttctcagtgttccatctgctattctactactactcagggattattcaggccccctcccttccctacacatcaagcccaaggatttgccccccacccaggactggcaaattagctttactcaacatgtcctgagtcaggaaactaaaatacctcttagtctaaatagacactttcactgaataagtaaaggcctttcctacagggtctgagaaggccaccgcagtcatttcttcccttctgtcagacataattcctcagtttagccttcccacctgtatacagtctgataacagactagcctttattagtcaaatcagccaagcagtttttcaggttcttagtattcagtgaaacctttatatcccttacggtcctccatcttcaagaaaagtagaacggactaaaggtcttttaaaaacacacctcaccaagctcagccaccaacttaaaaaggactggacaatacttttaccactttcccttctcagaagtcaggcctgtcctcggagtgctacagggtacagcccacttaagctcctgtatagacgctcctttttattaggccccagtctcattccagacaccagaccaacttagactgtgcccccaaaaaacttgtcatccctactatcttctgtctagtcatactcctattcaccgttctcaactactcatacatgccctgctcttgtttacactgccggtttacactgtttttccaagccataacagctgatatctcctggtgctatccccaaactgccactcttaactcttgaagtaaataaataatctttgctggcaggactatgctgaatctccttaggcactctctaatcagatatcctgagtcgtcccaattcttagaccttttatacctgtttttctccttctgttattccatttagttgttcaattcatataaaaccatatccaggccatcaccaatcattctatacgacaaatgtttcttctaacatccccacaacatcaccccttaccacaagacctcccttcagcttaatctctcccactctaggttctcacgccgcccctaatcccgcttgaagcagccctgagaaacattgcccattctgtctccataccaccccccaaaaattttcgccgccccaacacttcaacactattttgttttatttttcttattaatataagaaggcaggaatgtcaggcctctgagcccaagccaagccatcgcatcccctgtgacttccaggtatacgaccagatggcctgaagtaactgaagaatcacaaaagaagtgaatatgccctgccccaccttaactgatgacattccaccacaaaagaagtgtaaatggccggtccttgccttaagtgatgacattatcttgtgaaagtccttttcctggctcatcctggctcaaaaacacccccactgagcaccttgtgacccccactcctgcccgccagagaacaaacctcctttgactgtaattttcctttacctacccaaatcctataaaacagccccacccttatctcccttcactgactctcttttcggactcagcccacctgcacccaggtgaaataaacagccatgttgctcacacaaagcctgtttggtggtctcttcacacggacgcgcatgaaatcttcatattttctcagattggttattttctgtttttctttgatgtttagaaaagtgccttttgaaaatccctgcctgatttagcccaagaaaagtcggggtggggggtgtccttactaagtcctaaagttaaaagtcaggaggatgacagatctctatatttacatgggtgtgtttactgcacatatatgtgtgtgagcctgtgagcacatgtgcatgcatgtctgtgtgtgtgtgtgcatgcatgtctgtgtgtgcatgtacatgcttgggtatgcatatgagagctgcatggatgcaagtgtgtgtagctggtgcttgtgtgtgcagtgtatgtgtgcgcgtgtgtgtcatgtgtctgctttagtgatcagggctgggaggtagagagtggaggtgggggagaagaaagcaagcatgcacagggcaagtcctggagggaggaggaggaagggaagtgctcattgctgctgctcagcccattattaaagagaaacaacattcccagcaggaggcagaagggcaataaaaccagtggctccacaatttatgatgctaactgagattccatagtttgaaacaagactatcccctggagcatcaaggtcaacaagccagcaatgccctggcttccaaagagctcccccgtgcccacctattaatcagcccattgctgaaagtgcaccaatgagctctgctctggaaacatcattaataagcagggacaggccagattgctaaaaattccaggataagggcagaaaggcatggaaaaaaatatttatatacacatatgtgtgtgtttgcatatggggtgtagcctattatgtatattgggccatccattacaggggtcatatataagtgtgtctcttcattttccatatattttatattatacgagaaatgttcagcctttagaaccttgccagatggaattagagcaattgttcttctgccgagactttgggaaattaatgaggttcgcacgcagagccatgagaaaatagaattttttttaaagaaggaaagaaagaaaggaaagaaagtgccccgtttccaaaaatacagcagccacaatcccagagagagctatccgtttagtggctaatcttgaggcccatcagttgccccagcttatcttttgggttattgcaattctgaatggagctttaatcagcttagcccagcctgggcgccacgcgcctgccggcaaagggcattttcctacagatcctctggaaaccgtctcctctgctcttaataaatggatcattctctctctgggtccatcctggaatgcagcgcttaactttcttttgtgttcaaggaaagaaaaagagcaattatagggaggaaacccatgcactctgaaccccaaattgaaggactgagcattttctttataccaaggcttcaatattgtctaggaggttggaccccaaattggaagtgtcattcccaaaaatgtgtttctgttttactgttctatcaacaaaacttttcctggattctctgtccctgtcagagaccaccctgaaaaaggactctgtgcaacttttgtcactctccaagccccctgggacaagcctttggccaacatggcgacctcccattctgatggctcccctacaatgcaagggggtgggacgagagcccagcgctgggtctttgcctcatcagatgagcaagctggtcccagatgaaaccactgctggcttgcctcctgctctgctccattctatgcctccagtttggaacaggaagggatttttgtcagcaatcatccccaaagggtgttttcctattgcttaacaggccccagaaccagaaatgctgtgcattttcccagctctttggctccctgcagccctgtcttctgtttggagctgtctcggagggaacacagaaaatttacaatatgctgtgtttgttctgaaacaacagaaaatggctctgaagcggagctttaagagactattcttgctagcaatgtagggaagggcatatatattcttttgtatatgcatgcattgagatgatatgtgggagattgtttaagctgccctttttttgagcatgtactgtataccagcagtatatgttaagcatttatatccatcatgcaatatctttgatgaaatggagactcaaaattttccaaggtccaagaactggtgagtgtaggagttggggtttttcaaccaggtctgtttgatccagagtgggttctgtgtccccctgagtcctgttccagggtcatcaaatgtcagaacttccaatagaaaaagataagctcactaaacagtgcccttttgcagatagacaattgatcttgtcaattactaagtagtagaaaggagaccagaacccaagtaatacagggatcttattctgtgtttctgtgtgtttaaaaaacgatgaagtggagtggggaggaaaggctccctccctctgcaccagtctttgcagagggtccttaccttcctcactgagtaaactcaaaaggcatctgctcaactaccagggctatgagtatgaattcattcattccattacccttaacacaccctgggcaagagtgatcacctgatggtgggaggacagcaattgaaggaccaaaggcagcctcagtccaagaaccagtgtcagtgctgagcctgagagcaagtgcctcatcataagagttcctgagagggctaaggccggacatggtggctcatgcctgtaatcccagcactttgggaggctgaagagggcggatcatgagttcaggagatcaagatcatcctggccaacatggtgaaaccctgtctctactaaaaatacaaaaattagctgggtgtggtggtgtgcgcctgtagtcccagctactcgggaggctgaggcacgagaatcacttgaacctgggaggcggaggttgcagtgagccgagatcaggccactgcactccagcctgggtgacagagtgagactccatctcaaagttaaaaaaaaaaaagagttcctgagacggctgggtactctgcacacacaggcaaactgagtgcagcttcctaagctagggtccccaggaatggattctgactcacggactctccagagagagggagacgctaagctgcagagccaagggaggtggggaggacagcagctgctattgttgtttctctctcgaccttattaaggcaagaggaggacccattgtgctcctaatgattgctgagatatgaggtatgttcactgagaggaagtagtttggttttaattaaaaacacagaccttaagatgagctagagaaggaaaaattcagggccaaccttcaaagcagcttttgggaaactgaatttgagttccacctaagtttcatgaccttgaatgagttatgtccttatgctttggttttgccattattgtgactggcatgtaagaatttttgttgatctacattgttacaaatatgggatttttcaacccagctctaagcagaggctttgcattccatggtatcttcatttattcacattgcaccttaaaagaaagagaaaggaaaccgatagtcattgataatttactctgtaccaggtactatattaatccagtttcatcctcatcttacatagtttcagccccattgatagatgagtggcagaaaggtttcaaatgttacctgatctcacacagctttaaactgaagaattgctgttctgatccaagtctgtcgaatctttgtctgtactcaaactgtctctgatgcttaacatcatgcttacacatttttacattctcaacaaaaaccaagggatgattctttccatgctccttggtactcagcttttcttgccctatatcatttccatttgcaaatgggccctgcttgcgcatttggaacatttatttgcaaattaacattttcacatccaactgttcacccacctctatgtacttaagtcaaaaagactgcaggacacttacgttatctccttctcacatgaagctaatgcctgaaatccaacttgtccttgggcctatagctaagtccatggagtagaggaggtgccagtgatggtggcttggtgcagcaaatgggcatgcctcaccccacgttcccaatccacttcccctcctgacttcccatttaggagtcaataggatgatattctatcattagctgaggcttcagggccagggttatgtcagacctgccctggctgggcctgggtctcgcaagctgcccagatgatcccagggtccccaatgggggtagcttagtaaataccacaattcagagatgtctcaaattgtggaagggaaaattaactcagtggctgtatatcaaaaggcaagtggccattcatcaataaaaggcattagttacttagcctttcaagaaaaacgagccaccaatacctacaagagagaagcctaagaacaaataacctctaagtccaaatggggcacttcatcatccagcttttccctctacctgtagatttctgattggcctctctaccacttttattgcctcaactcaaacttattttcatgtgatggagagtcaaggcttcagggtttcagggccatgtgtctattactttactgtttactgagagataacagctgaaagaactcttgcatttttagaattggatttctttttttgttttttctttcataacagcaggcttctgctctgtttggctctatctggttgtgtctggtcatgctctgtcctctgcagtaacttccctgctttagttctccttctcctttccggagccagtcccttccagcttctcctctggttattctagtggagccccatgatgtctgttccagctgtttataattacctccctcaggctgcttggggtgagtgactcagcactctgccttgttttttgtttctttcctttttttttttttttttttaagaagccagatatttgtttaacatagtccatccaatatcacagccactaaatgctcatttctggttcccagatctaaacagcacctacagttctcaagtcactttgtataaataggttagattttgaaagtagaagtaactggacctgaattccacctccagccttttgtgcctgtctcttagcctctctgagtctgttttctcatctctaaataggggccatggcatgtgttcacaaagttattttggagataaagtgagacaatgaacagaaaaggccgaatgcagtgctcacccactatttttttttctccaaacataagcatattatttctcttttgtttcagatatccacttaaaaattacatcttataacttattccttctaatcgcctcttgtatgctcccacttctcttccatttctattactttactcctattaaatcaaggtcataatgcttatttctgaacatgtgcagtaatgcccaagtggttttttagcttctgatctttgactttttgacatcaaattaatcttctaaattgtacattcttttcttttctttttttttagacagagtctcactctgtcacccaggctgaagtgcagtggcacgatctcggctcactgcaacctctgcctgccagttcaagcaattctcccacctcagcctcccaaatagctgggactacaggcatgcaccgccaccacacctggctcagtttttgtattttttgttagagatggattttcgccatgttggccagactggtctcaaactcctgacctcaagtaatctgcccgccttggcctcccaaagtgctaggattacaggcatgaaccaccaccacaccgggcttaattgtacattctatccctgctccactatcagtacctagccttccctggttgctttcagctgcaggtctgagttttgcccctgtggattcaacactaccttccctgtcctctgtgcgagttttgacaaacgcaggggatctcctcagatttatccatttggcagataattaactatctatcacccactaagtgccaattgctgttaaggatcttgaggtcagacatgagtaagacacaacatatttcctcaacataaggttgcctcatggctaagcacatctaagtcactctggcaaaaactctccattgccacgaagactttactccatgtccatcctaaacaaaccagtctcagcctcaccagacagtgagctctcaaatgaattttgcactcctaggccttgcttttactgctacagcatgcctttattcattcggcagataattaactattacctactaagtgccaattgctgttaaggatcttgaggtcagacacgaataagacacaacatatatcctttaaagaattataagatcacgccaggcacggtggctcatgcttgtaatcccaggactttgagaggctgaggcaggcagatcacctgaggtcaggagttcaagaccagcctggccaacatggcaaaaacccatctctactaaaaaatacaaaaattagccaggcgtggtagtgggcacctgtaatcccagctactagggaggctgaggcagaaagaattgcttcaacccgggaggcggaggttgcagtgagccaagattatgccactgcactccatcactccagcctgggtgacagagtgagactccgtctgaaaaaaaaaaagaaaagaaaagaaacaaaaaaaagaattataacgtcagtgggagaaataaattccttgataagagctaggatgacgagatatacaagttcttgtgcttcttctgccagttagaagaatcttcctaattctcactcattctttcattcaagtgattttttttgtattttgttgttgttgttgttgttttgttttttgtttcttttgagcacctcagataatataggcattgaggatgtagtaataaaaacacaaacatggtcttcattttcacagagcttacagtctagtgggatataaagataacacatgattaaatatgtaattgcaacttgtgagaagttaattcatcaattcgacagatatttattgagtgccaacaatgtcccaggcactgttctaaatactgtatatacagtaacaaagctacagacctttcctgacttcatagatcttctacacagcaatcaagaaacaagataaaaaggtaacacatattacaggttactggtaaatgctaaggagaaaaaacataaaacaggaaatagggataataaaacatcatggggagaaaggggtttttacattttgaatgaggtggtcaaggaatgcctcccacgtaaatgacttttgaaagagaaccttgaaggagtgaaggagcaaggcatgaggatatctgggaaaagagcagtcccggaaaagggagtggcaagtggaaaggtatggaagtgggagtctatctgggtaaagaaaaatacagcccagtaacaaagaagagcaaggggtgtctactgcagtgttcagccaaggcctctgtaaagatacacccttaatctgaggtgtaaaggctgaggcaggtgtccacctgggttatatgagtgtgtgctccattttggatttctttttctcactccagatgcttccagaggctaaaacttatttctgagaaccagcccactccaatgacagccggccccttccagctgcctccttccaggggcctccaacctgcaccctgctccaaattaggatgataccccattgttatcacagcttggagattcctgatatctctgctcacactcccactcccacaatgccccactacagggatgagactaagctggaacctcttggaattctctacatccatttggacaactggaacccctccctctaccaacagccagttttccaactgggcaagtttcctccatatttatctcagtgcctcttcctcttccagaagcctcctgtccctgaggtcccagcatgccttgcagctagtcatggccaagttctgacatgttcacacttccccgaaaaagaaaaaatcagcagtatagcttctggagacttgattatttatggggcttcagtctacttggaaagcctacaaagaaaaacgacaaaggaatttgagttgtgatgagttatgttcaattctcctttgccatttactagctgtaagtctccaggaaagttaacttcactgagcttcagttttctcatttgtaaactgggaattcctttcctaccttaaagcttttgaaagaatcaataaaataaattaattgaagtacccgaaacataagtgtcccaatgaacgtttgttaaatctgaaacttccatgtcctctttggtttatgccaagtgccagcaaactactgtgtataggctgaatccaacccatggcttgtttttcataaacaaagctttattggaacatggccacaccattaatgtacatattgtcaaaaaatgctgattgccacagcagcagagttgagtagttgccacagagaccatatggcctcaaagcctaaaatatttactatcttgcactgtatagagaagatatgcaaatccctagtttataccatcatgggacactagaatattgtggttgagtgcaggagctggagtcaggcttcctgagtttagatgcacttttaccacttactaactatggaattcagagcaagttatttgatttatctatacctttgttttcacttctgtaaaaagggaatactagtttcttacattaagttgatgaaataattaaatgagccaatctagtgaagcatccagcacactgttaggcaaatggttagggttaatcaatataatggttattattgtgaatattatataatgttattacatatgctatccaagcactctctccattaactgggactatggatggcttttaaaatcaacctgaaaaccaaggttcctgactaaaatggcatttggcatataaacatccctccaaggatgtttatatgccaaggatcagggctcaaggatctgaacccaccttcatctacttttccttatggccacatccctccttctacttcctccctagaacctgcttggtaatgtggcctgaagattcaggctctctagatgagactttctctgtaatgcccttggcaggtgtgggcatgagtcaccgctgagcccagaccttttgctagtgaggatgcacctcccttcaatcatcattggcatgcactgcacaccttactgggccttgacattgaccagactgaaggaaggaggagcaacctctagtgactcctgtgagcagctgaggacttgttgagcagaacttacagcttaaagttaagggctaaagtgatagcccaggtggaaagaagaactaggtcagggcaggcaaggacagatgccctaatgtcttgggtgaggccacctcctggaaactagaaacccgagtgttgggtgcccaaatgttaaaacacaagagctcccgttaaataactctgactagacagatgtgagtcaataggtcaaaaaggatcaagagccatagagttgaatatactcagagccacttggcaagcaagaaaaaaaaaaagaaggctgtccaaggagaccttgtgtgtgtgcgcgcgtgcgcacatgtgtataaatatctatactctatagccagtgagggataagacagagcaacaacgcagcatgagtatgtttgattcctctacaatgcaagatttctaacatttataaaacagttgactctcattttccttttttaatgacacaatttcttaagtcaacataacctgacaaaatatgttcaactttggacgtgcataaaaagtcttacaaagttatacattcaatcaaacagatttacgtaccatttttaaggacaaaatagcagactcacgatatcaggttagccccagatcttctgagactcatgattcccctatcaataggacatacactttgaagcagctatcagtaatttttaaagaagacttcccatgtgaatcaaagggggttgattcagagccaagccacctgtagggagtgtagcacaagctgccaccacctcaccctgaatggataaagatattcatgcttcaaatctagggccccagcacacgccccaggtgtggcaatattgaggcgcaatagtcctgtcaaggaatgcaggtgactgttaaattggtttgctggagccaagaaattgtctttagcaaatgaggacacctccttgaaaaataaagacctcagccaaaagtgccaggaactctcttgctcccaaagtaaggtaattttctatcttaaatagccagtcctggccccagtgaactttgcaagcaggtaactagagcattctctaagaaaaaaaaaaattatttctcacactgacatgttctttctttcactttattatcattccaggtacagaactgagtataggggcaaatgagtctaaatgaaggaactttctagtccccaaacagggtgtggtatataataggctccccataaatttgcagaggctttctgattgactgtgttccactttgggcaaataaaccgaagccatttgttctctgcctgatgctacctctgcacactgttgtttcaagcatgtttctaaaatgttctctttgctgacaagaattgaatacatcaaaatgtaataacattctcgtagatatttcttttttgatgctttctaaacaaattacccattccaacatagagattaattagaaatatgctttcatttcagcttgtccgtgtgtctgtctgtctgacaggctagtagcatctttgcatcataccagccaaatccacaataaatctagtcatgcccaaaggtgggtttcaatgtgttcaggagcttgagctaggaaactcaggatgagcataatggaaggtggaaatactatggataatttagcaaacattttgggaaaacatcagattttccacaagtgtgggattcatcagcgttagagaaggaatgctgggtgcatcttcgcacatccacaatgcacacaatttgagactggcacttgccttctcttagcccatcaggctctgcaaacacacaggctgcagagagaggagagaatgtacaacctaaaaggagcttctcttcttttctcttgaaggcatttaaccccttggcacttcagagattttctgctttaggcctgaagctaaagatgaggataggttatgttgctgaacaaaatgagaaattcttctccccgagacagaaaggtgggctggaccgccttttgaggtttggtggtagttgctttgaggagatgctatctgaaagatcaactgcgcaagggttgatctatgaggcacatgaccgcagtgcttgcctgcctgaacaacatggtccctgcccagtttcttcttataggtgagtcaaatagattgctccaaattttgccatttgggagtaactgcatttatgactgatcgtgtcccccgaacaaagtcactgaggcaaacccagccccacagcatatctgccctggttataagcatttccctaccacctattgtaagctcagagcagtgctgggtgatttcacagggagccaccaaatatttcgagttctttatcttgatcctcctggcagcctttcacacaggtactgcagggaggtccttactaagtccagagctaggtgctggggatacagagatgagcaaaaaccaaggtgaagggctcagaatccagttaggggaatggacactcaccccaaaatcacatcaactaatgtgctattccacaatgactcaagtgcttggagggggaggaccagggtcctaggcaagttctgggaagcatagcacagtggttaaggttagagacatctgcccagagtccaatctcagctctgcctgctttgctatgagatctcagccaaatcgtttggtatctctgtgctttatgtgtaaaacaagactcctaatagcacctgcatcatgcggtcagtataggagtaagtgagatatttgcaaaacgcctagaatagtgcaatgtacgtatgcagctaaggaacatgcagctatggagatctgtgagggacaaaccattattcttattttggtgatgagaaactgaagttcaggtagatgatctgactaccccaaggtcatatactctgtgtacctgggcggctacctctgctgccccccaaatctggcaatccactccttcaccatgctgcctcctgtcttggcaaaggagcatgtcagggagccccagcctcgggcagggctcagctatcaccaccacagaagcagcctcactatcataacacatctctgtttaagaaacataaaccaccctttggcagcttctcaagtacatgtcagagccattaaagagctccctcccctcaccccacttttctgctttgactgtaagacctagccttacagggaaacacacaagagcttacccaacaggtttccccaacaaccatgccagagcaggcaggccccaaggagcccaggtctgggagggcccaccctcctggctgccaatgccccctctgacccgggcgccggcggcctccctctcctcctgtctgaacctgctgcctgggaagggctgatgtcactaatcttgcccttgtagctgcaggccatctcaggctcccaaacgcgattacccacaccaccagcttcacgcaggccctgcctccttccccctggcacctctccagctgtggctgagagcccagcttggtaaagggatggcctggcccagtggtgagtgtcccggccgggcaacttggcgcaagcctgacaagtagcatctgtgcttgtggaacctagcagcaagagctgggccaaagagctgagttccaaagctgggcctgcagaggacagaagagactctggaaatgagatgacaggatcagaacaggtcacaaatcttcagggagttattctaagaagaaatcacacccagttcccaaactgagtgtaaatgactcctcggaaaaccattaacggtgcccacctttccatttctcattagtagcctccttgcatcctggactatattggggacatatcatgttcacattctccactgatgggagctgaggccatactcagaatttcccaagggctcctgaggacagtaaaggtggtgagaaggcaggtgtttggctcagagttggcagaacaagcagggactccagagggcaatcagatttagtgcaataaaaaaaaaaaaaacattaaaatgaaagcagtaacaatagctcacatttgtcaagctcccactctatctcaggatctatgcaaaatactttatgcacatgagctcactgaaacctcacaaccactgggaaggtggatgttgatatttttcatcttacagatgaggaaacctgaatctaatggagaagaaattacttggctgaagctattcagatgctaagtggctgacctgaaattcaaaacctggtatgcctgaccccaggacagacccttccatgaataataggggccaggggtctctctgctcctcctcatgagctattgtgtcatggttttacaaacagcagaaactcatctttttgcttctaatccacctggatctctgatgctttaagtccaataccagataggtaagtttgacacatctttgggggttgcaactgaccaaatactagtcattgaccaggtaatgggcagcttagaagctctggagtcagatgtgaaaatgtttcccaactatgcaattaatagtctgggtgaacttgcttgtgttcatatacttctttgagccaaaggcttcttatctataaaccaggactaattatcattacattaataagcagggaagaggtggaggaaaaatggagtagacatttgaaatacaatggcagactagattgcaaactctagggaggcaggaagcaattacatcttgtccctgctgtacttagagcatccagttccctgcctgctagacactttgttcaataaattcttttgaagaatccattttacaaaattacttgcaagtttatgcaaatagacacattggttacatgtactaccaataagaaacaatccatatgaccatggatggagcatagctaaacaaacgtgagttatttcatgaaatcgaatgtgagatagtcatgaaaaggagcgagagaactctatctgtaatcatgtagagaggcaagcaggtatataaatagagtgaggggattgcagaacaatttgcatttatggcaaagtgcctaaaagagggtcaagagaagaatccatactagtctactaaaagtggttacttccacttgaaattaaaatttcaagaaggaatggtaagtggagaaggcggtgtggttgctggtgtaggaatatatttactttttgccctgtgcacttttgcattttttaatttgttttgacaacgaatctgatattttttgttacacaaaaatgcagtcaaaattattcactcattttaaataagtgaatagaagaataaacatctcgaatgccaaacataaaataggccccacaaatgttcatctttttctctcccttcccctaaagaatatttatcatgtatctgcatctctatgaccacaataagacattcaaacatatgcaaaatcttgctaaaattggttttgcccatcagtgtgtgtggccctgcaaaatctgatggcacccagctttgtggagtttcctggctatgtcttaaaaggacacatgacagacagcacagccatgggtttgctccaaaacagaaacagaaacttggatgctttgacaaaatttgaaaagggatgggtgggctcctgggatatctagcttagaaataattctcatcggaggctctgccatgacctcagtgccaaggaatattcattatcatggacctagtgtcttaccaaagagtcataactctaaattagaaaaccttaaggcccaagagaaaagtgaagaagggcagagtggtaagacaggatcatttccagagccagtgaacagtcattcaacatagccaggtccccttccaaaggaacacgcccttggttgactgcatttgtgtatctaattatcgagagaagtgggcaacttttgttttgagtccctactatctagacccagccatttccaaacagaccttgaacgtggtggaggggcagagaaagagcagaaaggtcagaaacaaacatttaggaaacacttactttgtttctggaaccactctagctgtctaacaaagaaggtctcctaggacttcgaaataccttaggaggtaaattagattacccccatgtcacaggtggcttagagaggttaagtgatgatcccacagggatttaatagcagagcctggaagaaaatttaggtttgtttgactccaaagcccatcttcacccaatacaacatacccaaagcaagggaacacacatacacaaacacacaactctttttttcactgtaactacttatacaactggactagattatagagggtgatgttttcttcccaatgtttcatactctctgggaagagtaaaagacacattggacagagcaagaatgtcacactgtcatacatcatgctgatattcacttcttagaaaatacttttgatattgtatatgaagtctcataaatattcattttcctaatctccttataccaatagatggtactgtttaactctctgtggagagctgtgaggcagacattggcaagggatgaatccccaatctctgctcctccccaaaagttgacagcctggtaggatggatatttgggttgcttttattttgtggtgaaatattgcagtaactattcctgctttgcttcttcttaggtactgtaggagtttaaaagttcctgaaagagcatcagctcaaacacatcaacttacaaatgaagaaaatgcagacagagaaacgaagttctttcttaatattacatagtaagtcagtggaagatcctggagtaacttatgctccatggctccctgactccaggtagtcaaatgtcttgacaaacagggaagcctactccatgtgttttgttaacagatttattgacttcaatgtataatttacataatattgaattcacttgttttaagtgtacagttaaatgactctttgtaaatttataaaattgtacaatcattgccaccatctaattttagaacctttccatcaccctagaaaacacaccttgagcccacttgtaaacagcccctgatcccacccctacccccagaaagctgcaatctactttttgtctctatagatttgcattttctggatatttccatatgtagactcatacaatatatggtattatgtgtttgtttctttttcacgtagcataatgttttaaggttcatccatgttgttatgtgtatccatactccacttctttttattggcaaattgttttctataacatggatatatcccattttgtttacccatttactatttaatggatatttgagttgttttcactttttggcatactgggttttaacccacatgcctaccccaaatgactgatcgtggctgctatgtatatgaaggattttgtggctatatctagactcaatgggaagagtgcccttgatgattagttatttctgtcagtggagagggaacagaaaatgtgggcatgcatacaaagtatcattacactgtttccaaaggggtctcttcttgttttaaataaagtagtcacatttctctcatgaaaagagttaaaagaaggcaagtcactgcaattgggaagaatcatgctcatttttggtgatgagcataccttttacatacaatttactactgcacaatcagtggctggggcttctttagcatatttttctggaaaggcaatggagccacatggtcatggctccttcaggccagtttctcactgggctcaggattaacaccatttatgtggccaagggttggtgaactcaaccgcagatagccccaagtgactgatgagttagcattcctggtgatcttgtcaacagccaagttgggtcttttttaatttttttattctgtttttttttttttaagtaaaactaggaagatatattatttccagttttcccttggggatggaagtatagacttaactatttcaaaactcagtgggcttggtggtgtctttgtattgtcatttataagaaaagagatgggaatttgagtgggcctgttggaagaatgaggaaattgtggtttatgtaaatacatcccaagcaaaaaatccagtattactttaggataatataaagaaaacactgttgtcagggggaaaaatagatagaaaaagaaaaagtattagaggataaagaagaagaggaagaaggcagaaattgataaaggataaaataaattgcaaataacgcattggttgtttgttagtcaaactcagcctacaaccatgttgtaattgttccacatctttttgcaaaagaaaatgaattggttccaacacttaaaaaaatcaggacacattatgtacatttctaagtgccctatgtgctttgaaaaaagaaagaaagtagatgacaggttgatgcgtgcagcaaaccaccatagcacgtgtacatctatgtaacaaacctgcacattctgcacatgtaccccagaacttaaagtataataagaagaagaaaaaagaaagaaagtctggtaaacatttgctataatagagtaatagctgttccctgtgaatggggcaaaaacgtaggtttattgcggcaccgttaacaatagcaaagacttggaaccaacccaaatgcccagcaatgatagactggataaagaaaatgtggcacatatacaccatggaatactatgcagccataagaaggatgagttcatgtcccttacagggacacggatgactctgaaagccatcattctcagcaaactaacacaagaacagaaaaccaaacacaacctgttctcactctaaagtgggagttgaccaagaagaacacatggatgcagggaggggaacatcacacactggggcctgtcaaggggtagggggctaggggagggatagcattaggagaaatacctaaagtagatgtcgggttggtgggtgcagcaaaccaccatggcacgtgtatacctttgtaacaaacctgcacgttttgcacatgtaccccagagcttaaagtataatttaaaaaaaagaagaaaagaaagaaagtctggtaaacatttgctataacagaataacagcggctccctgtggatggggcaagaatgctccagttggccggagtcttcactataccctactgtttacattcagtagcttcacacgtttatgtgactctgcatctgcaacatctgaaacaactgtgtccatattgactcccagccatcctgccgggaccttgggttatcaccacatttttcagagggtaaagtaaatgttgtaggggttaactgacgtgcccaaggtcaccatcagtaagagtcaaagctacttctcatttccagatatctgctgctttttgcagtctgtcatcttgctttgataggtagagaaaagaattgattaaatataaagcaaagaatggagtaaaaaacaaaggaaaaaaactgaggaagagggagtgatgggagcttttaaaataaccgtttattacttggttgaaaattaagctaaagcatggactctgccaatgaagggccaaacacaagttggttggacacatatattctttccccaggtcctagaaacaagtccacgcatcctaggcagaaaacattgttttcctgactcacagagacaactctgaaaagcatctgagagttggtttaggaataaaatcacctgtttaaattaactaacattttctaaatatttatttaggaaataatattaatatacctatcactcacaacttgataatattacctatcactcccaaacttcagtggattagcaagctccccaggcagttccagaaatgcagtttaggccagagttactatctggtggtatagcccctctctaaatcagtctctggaacaggcctgaccactgtattctgtcagaatttattgaggcagcataagaccttgtttctcacttctttggcccttggcaaaagaacctgagatctcccctgagagtcaccacgtgtacagaaatagaggagagcagagaaaacaagcatttctttttgcaacttcacaatctatttctggggttgaacagaagccattaaaacattcccatgactctgtgccaagcccccaaattactaatgacagacatgctggctcaaagggagtcactgctggcaaatatccctctggtatcttgttaacagtaataaccctgagcctttcattgaaagatctcaaagcacagtgcaagccttaattgactctcccctcaactctgtccctgaaaaaggtaattatcattatattcctcagacagtttacacaggggttaaatgggcgacggaggttgaatgatttatccttgtttcatattccgagttgaaaggaaaagtctaaataatgtcataacttggggtgaactcagctgtatgacttgctggaaccagtgggatagcagaaacagagagaacgagagcctggtgaggctgatgcaacgagagaggccacaggccaagcactgtgtgcagaggtgctgacctggagttattttagcctaaggacattatccataactgcccagtgcaggccagaaggaacagagaatctaagccagagtcctggaagtgggagaccctcaatatcacgtacctagagtctaaagccagagtccatgctcagtgatttagacaaaaatcagtctctatttctctggtgtgcagtgtaccaagagttggaagtgtacctggaccccaaacagataagaggttcatctcagtggagaacttgcatgctgggcatggcatctgggacagtcccccagtcctaggaactgcaccatcatgaagatgagcaccactgatctcacaaaccaattcctcctactacaaattctcaccttagtaaacagggcctctccttacttaagagccataaccaaagtgcagggagtcatcaactccatttatatttgatacccaagttcagatgacacaattatcttccaaaccaggcttcttatcaccacccctaccaccattgactcatttgaaacctcattatatctcccctggattattttaacagcctcctggctgttcctgttgctttcagacttttcccaagccaaacaatcgggactgtccaaaggatatgagactgtccaaaggatattcctggaatgcaaatgtaagcatggcatttataaactcccctgataaaattcttcaagttcccttccacagggaaaagtgtaaaattcaaaaatcagggtgaaattatgtttccgataaataatgctgaaataattcatcaccagcagatttgcactataagacatattaaaggctgttcttccagcagaaggaaaattatgccagctgagaacttagctctacatcataggcatgagaaacattagaaatggtatatataagtgagtatatataaaacactatttttctcatttttatttcttcaaaagacaaatgtttgaagcaagaataatgctatttataacataggcatgaatcaaattgaatggtaacaaaagatggaaggggataaatgaaagcatataatgtatataatataagagtcttacattattcatgaagtgagatgatatcatttaaaggtaggctgaagttagttaaaggtgtgtgttatattccctagggcaatactaaaaactaaagcaagggctagctaataagccagtagtggaaataatagaacactaaaacaataattgacaaaaacggatgcagaaaagaagacaattaaaaaaatgaatagcaagattgtagatttaaacttactataccaataactacattaaatattactaatcttgacactccaattaaaagacagactgtcagagaggataaaaaggcaatacccaaatataggccaactgtagaaagccctctttaaagtcatagtgtggttacaagttaaaggatacaaaattaaataccatgcaaacaaacactagacacagactagaatgtctatattaatatcatacaatgtagacatcaggataagcaatattatgaaataatatgaagaattttataatgaaaaattagaaagtacatccagaagatataacattttcaatctgtatacaaacctaataacagagcttcaacaatgcctgaaaccaaagttgatagaactgaaaagacagtgagacaaattcataattatagttaaaagacttcaacattgctcactcagtaattattagaacaagtcagcaggtaattattagaacaagtagtaaaggtatagatgactttgataacgttaaaaaccaacttgacctaagtgaaatgtttagaatagtccactcaacatgataatatgcattcttttcaggtgcacagggaagactatatggtgttatattatattataagctataaaagaagtatcaataaatccaaaaaatctgaaattattcagagtatcttctctgaaaaaattaaattaaattataaccaagaatacaaatattctatgtgaaaacatctcctaaatttgcaaactgaacaacacacatctatatagactgtgaattaaagaataaatcacaagaaaaattagaaaatattttgaactgaaatataatgatatcagaaaatattaaagcaattgtggaaaggagctaaatcagcatgtagctggaaatgtatactatattataaagtgcttatgttaggaaacaaaaatcgtataaaatgagtgacctgagctttcatttaaataatctataaaaaagagcaagctaaacctgaagggaatagaagtaagaaagtaatgagaggaagccaatgaaataaaaattagacaaacaaaacagaaaaatcaatgaaactgaagctgtctctgtagaaatacaaataaaatttataaactcttaaatagactaatagcattttttaaaaagaagaaacaattccaataatttaaggtaaatggggacatcactacaaatccacagaaattttaaagagtaataaataagggtcaataataaacaaaattatgctaacaaatttgacaacttagctcaaatgaataaattctttgaaagatacagattatcaatattgactcaagaagaaatagaaaacttggatagtcccatatcaatttttaaaataaatccttaattagaaacatccacacaaagaaaactccaagccaagaggacttcattggtgaattccaatacatatttataaaataaataacaattctacgcaaactctttcaaaaagagagtatggaggaagatttctctaatcatttcatgaggactcttttacccttacccaaaaccagacaaaatattacaagaaaagcatactttagactgatattttttatgaaaaaaacacagaaaaatccttaatctttagtaaattataatcatctagatataaaaaggtagtatattataaaaaatagatttcagactttcatgactggcttaacatttgaaaatttactgtatgatcagaataaagaataaaaaatctagtcacgtttcagtataaacacatattcatatgtgtgacaaaatttaactcttttttatgattaaaaaatcttataaaactagaaatagaagaaaattgccacaatattatacagattacctatgaaatagctgcagataatatcataattaataatgaaagactgaattcttattctctaagttctggaataaggaaagatgtcagttctcaccacttctatttaatactgttactgaagtcaaataaaagtcatacagtctacaaaaaattaaagctgcccttatttgcagacaacatgatcatgtaaatacaatgtcctaaaaaaacaaaaaaaaaagttattagaactaacaagttaattttaaaagattgcagaatacaagttcaacattcagaaatcaatttaaatctatacatcacaaagaaacaattgaaaaataaaattaaaaatacaataccctttatgctatcatctcaaaatataaaactcttaggacaaatttaacaaaatatgtacaagacctctaaacataaaactgcaatgcaatgctgagagaaattaaaggtctaaataaattgagagatataccatgtccatggattggtagactcaatactgttaatggcaattctcccataattggtctacattcaacaccatcccaatcaaaattctggcaggctatttgtgtagaaattgacaaaatacaccctttaatataatgaattttattttttgtgagttatgcaacaataaagttgatttttgtaaaaataatatatatttatacagtatattatgttataacatatattattatattatatgtaataatatatattattatataatatgtaataatatatattattacatattatataatatgttataatatatattattgtgtattatattatatataatgtatattattatatattatattatattatatataatgtatattattatatattatataatatatattattgtatattatattatatataatgtatattattatatattaataatatgtattattatatattatattatatctaatatatattattatatattatattgtatctaatatatattattatataatatataatatatattattatatattatataatatataaatatatattatatacaatgtataatatattatattataatatatattatattatatattatatatatttatctattatatatatataacagtaacaactacaaaagtaaatccattaagaagttagaataacctcttctggaagagaagaaaggtcagaaaaacattatgaattcaaaaatttacctaaaataaactaaacttgaaaacagaaataatgagtcacctgggttagcaaaactgcattccctgctactaggtagaagagagagctaatgagctaagctaatttcagtactaaaaaaattactggaaaagttacatttttgcatgcatgagtattttgcctatgaaacatgatctctcatcccttgttaatgaggaggatatctattcctcccacttcaggcatgaatatcactatgctattggaagacttggtccccaagattgcttgaatgactatgtaaggaattggagactagagccaagattaaattccgatattaaacccagtgcttcaaaggacctaaaagagcatttgtgcctctgaactgtacaaaatttctgagaaagaatctggtagccttcagtaaaacaggcaggagctttctgttttagaagccctctctattttcagcatgctttctgatggtttctccatacttgcagtgctgagaaatgagcatatacatcaaactttgctgtgcctacatcaaacatagggactttcagcttctttgatcttgatactatttataatttgttttgtctgaattttaggagcactttaaacagttacattgctgtgtatggaattagatatctctttctgctgcaaggtaggtaaaatgcaccatattatcatgaatgcagggctgtatacttctactcatgaactctcaaggtgtttgttttaatctcttcttcttgactgacaagatcatgtgtttaatatgaattgttacacaatatcttagtgacatctgattgtttttttccacacttggagagaggcagcctctaactttgaaggaatatcagcaggtaaacacgagaacattacttgaaagcatgagacaaagcttcaaagcttcaatgcttcagggtgcctagggaacagtaagcaaccacacaataagtattactgaattccaagataagaaggcttgtggaacacctgaaaaaataggtaaggattcctgaaggaaagtgcaccacagattatttcagcagctgcatcatccagaacttgagcaatattttcttatgttcagtcttcaggatgagcaaaacacagcttccaaactcactctaagcaagtctcagacggaagatgataggaaggaggtgatctttggtaacataatcaagttgctcaacttggtgctggtgaagcctctttcaagatggttcacttatacggctggaagttgatcatgactgttggctcagagctcagccaaggcttatagatcagtgggcattgactcctctccacgtgagcctctccacagttgtttaggcttcatcacagtatgttggctgggttctaaaagacagcaaccctcaaaaaacaaaattaaaatgcatggcagtcttttgatctaacctccaaaatcatatagtatcatttctactggactctcttggttgaagcagtcgggaagacccacccaaattcaagaacagacacagacaccacctcttgatgggggcagagtttaatattccagaagaggctgtgatatggaaaatacagttgcactcatctttggaagataatctgccagatcaaataactttgagaactattctccatttctccacttctctatgcactctattgtatgatttcttttttacacatggaaagtaatactgtacaccattatgcacacatgaataatgtaatggaaaaagtaaaagaatatcctctctgaccttgattacaaaagcattttatttttaatttttgttacttgttttttgcttaatactctcattgtatagtcaaaggttttataaacatcaattctcatcatggatgggataaaataagtgacaacatcactttactttacttaccaatggcagatagttctatctgaacccaaatctttcctctaaattattctcaacatatttttccataaaatcaccactaatcattgatggttagcatatgtgaaaaaatgattttgccatcctagtacagtttgataatgtagctgcctggaccaagatgttaaaagcaggggaaaatctgaacctagatgggggaaggaggtagtaagaacttaaaataatatgtggaaacaaaatgaatcactacattacccccaaatagttggtgagagaagagccaggctataatatgacaggttcaattcagatttaagatgagattggggatatctgtggagacacaatgtgggaaaatctaggtgaggtatagttagggaacttaagggttgcgttataaggacaccaaattcagagtaagactgtgaccagaattctgctcaaacaggtgtagtactaacctcaaggatggattgatgagaaccaagcagtggtcagcactagccttctaaatgaagatcacaggcaggactctccttcaggggttcccatgtagggaaagagaaaccctgagcaggcgccttctcccggcagaacaggttctgtcctagctatcatgccaggtgtatataataatatccaaattcttctaatacctaggtaatgctgatattaggctctccctcttctgcgctagtgttttccgattgggtgtgcatgtcagactaatctagaaagcattaaaaacaaacacacacacagaagactgatttcatttagcttttggttgatctcacaagccgtcaacaaaatttgagtcaattgaagttagcattaaaatagaagaaatgttctaaataaccaaggataaatgaaacaaggaatatgcaggatgttcatgaagaaaagtcacatattgttgaccaaaataaatgaaattgcaaaagaacatgttcactctgacacattttgtacaaaagttttaaatatgcaaaacactatatatatagttatggacaaataagtatgctgtgaaattagaggttaaaaatgcacaaaacaacacaaaaaagacagtgcagcattattattattgttatactttaagttttgggatacatgtgcagaacgtgcaggtttgttacataggtatacatgtgccatggtggtttgctgacagtgcagcattttataatggtggttacttttgagagtagagggaaattctggtggaggaatgtgcctgtttctataaacttttagatgtcaatttaaaaatatttgaatatttgacacaaaaaacaacatgtcaacatttgatcactatgtctagttttaattttctctatgaaatagttattatttaagtgtaatcaataaacagaaaatgataatgatggagaaacgaagaagatgaagttgagaaggaaaggaagggaaggaaggagaagagaatgaaaaagagagagaagaatagaataagaaggaggagaaggagggaggggaggaggaagagaaaaaaaaggaagaaaggaatgaagtccccaaatattcgtaagaaaaaaaatgtttaattccacttggatctgtgttgaaaacttgacagcctgtttacgtttcatttagacaaaataaatgctgagaatgaccccagaatataaaataaataattaaaaaggtgaaatctaccctatcagatgtcaaatcatactatacagctatggtaattcaaacacagaacaaaaataagactacaaattatttaaagtgtggggaaggattattaaataaatatgacatggatgattggttaaatatacaggaattataacaaggcaaatgtctcctcccttacctcataaaatttacctaatttgatttaaattgatcaaaaattcaaatattaaagaagaagtagtaaaagaattgacaaaaaacaataatgcatctgattcatctcagggtagaggtgccctcattataaaagcaaagggagaatccataaaaaaaaaaatgttagggctgggcgctgtggctcaagcctgtaatcccagcattttgggaggcagaagtgggcgcatcacttgacatcaggagttgaagaccaccccggccaacatggtgaaactctgtctctagttaaaacacaaaaaaattagcgggtcatggtggcaggtgcctgtaatcccagctactcgtgaggttgaggcaggagaatcgcttgaacctggggggtgcgtaggttgcagtcactgccactgtactccagcctgagaaacggagtgagactctgtctcaaaaaaaaaagaaaagaaaaaaaagaaagaaaaagaaaatgtttgggaggttttaaaaattgtaatacctggttctgatgtgggtattgtgagatggatactttcttacaaacattttggcaacatggattaaaaccttaaatgataatattcccttcaagtcagtggttctatttctaagaatctaacctagtaaataataacaaatgcacacaaagatttaagtatatgtatattcattatatgattatttgcagtattccaaagtggttaacaattcatacacccaatgatagaaaatggagaagtactctccatacaatgctaactggcaaaaaggaaacataagaataacatggatctaatcacataaatagaatgtatgtagattgtgagtctctggaaattattcctgtttgtcattcttctttacagatgtatgtattctacaattaacatgaattattttatttttcattttaataaattatgttattaaattatgatatattgattttaagagtcaagaaatacataaagaaatgtaaatttactaaatgctttctttcatcccaccctcctatccccatgttccagaagtttatccgagtttattgtgtttactttcaaagacaactgtctttggatatgaacacatatctatgtttggaaacatcacatagatatgtgttcatgtgtacagtgtgtgtatacatatatgccatactaagacactaacgtaagcttcctgtgtgccagggcagtttttggtttggggaacatggtgattcacttatgatgatcccagccaatggttaatgtggacacaaacacagataattctgggaggcactaaaataaagttagaaagttagactcaggaacttaaagttggatttgatccttttttttctcatcagtgtatattttcttttctttttttgttttattttatttttttttaggttcagggtgtacatgtgcaggtttgttagatgggcatattatgtgatactgaggtttgggcttctaatgagaacgtgatcttttctaatgatgagatatgaggttggaggttgaaggtatagaaaggctttctggaggagccggcccttgatatggacactgaaaagagagatagactctccaggatacattaatctcaggtggagatagagaaaggctatttctgacagaaggaggagactaagttggggaagttgagcacaagatcaggcctgctgggcctggaaattatggaagatgttagtaaaagctaagacagtggaggttgtttcagggcacatcacaggggatctagacgtgcgatgtggattctgaatacctgtctttccacagtaggaggtctttgtggttttgagcaggacgatgctgctgctgacagagacaaggacagattgaagagggcaaccagaaggcagggagttaagtcagccagcttaattattaacgagatgaggaaggccagaactagagcatttttagtgtaaagggaggaaagggagagaaattcggagagatcatggagggcaacacagcagggttagaaagctaagctgtgcctgggatatctgactcccaggggtcatggtcaggaaggatggtaagaaagagggcttaccccttcttacatttcagacatatgttcaatgtaattcaaactttttaaaagacttcttgttgctttttaacttcccatgtcacgttctccatagtcacccaagtcaaagcctgaagaaaccaaagagacatttctaggagaagttgaaaaatggtgactggagtcacctccagtggcctccagctttggtgcattgactccttactagaaagatgtagggcttgctggaaaagcaataggtgtatcaacaggtcaaatgcccttgaccctgccaaagaaagaaggactgacaatgaaacccacatagatggggacatttcaagggcccatatttcctaagagtctttagcctgcatagggttccacttgccccttctgatctctgtatttttgcctggacttttctatggtggtggtcacagctgaagaggcgaatattactatattttgatcttggtaacacagtaattaattattttttttaatgacctgttaccatagagattaataagcaaaagctctaatactactagcctgccagggagttcacacatgtgaaatacttagaatagagtgacacagagaaagcacaccatatatattggctatggtttgtattcagattaatgaaaacatcacacttcagttctaaaggtgtctgtttcagcttctctaaccctccagcctagactcagtcctgtatttgccctgaaaacataggtaagcctggaatgactcttggtgtcataaacttgggatcccctgcacccattgtgggtctgtctgtggccactccagccatgattgtgaggtctggatgactcaggcctgctttgcactcagccaggcaccttttttagaactgaagccctattctgacctccagtccacttggcttgggccctgacacctgtctggccttaagaacctctctgcacacattgatgccattctctgaaccaggcagcctgacccgagcctgacctggcttgactgccactcctaggagaatttctgctgtcctcttctgcctcagatcagacccccttatattttatttccggactgactcaagtcatagtcaccatgctcctttctcgttattcaatacaagccctgtcccaccctgactgcctccctttcccagtgagcagatgcttttgaattcccagcctgatcgcattcaaagcgtgagatgggggatcttagaaatccaaactccccattctatggatgagaaaccgtggctcagagatgggaagtgcattcctccatcttacaccctgattgtaggacagacagaaggtaaaatcccagcccctgggaacatttgccttggaatattatcacaattccaaaaaggctatggcttgcttcctccacttgtccccaggtaacctccaagagagtttctttctgagacagtacttagcaagtaattccttcttacaaaagtagtcaaggtcctcagatttacaaaccccttctctccttctggcattccggggttgtcaggatattttggtctgtcagtaacctctggggctgaaacagaggaagagaaatcattggaatctttgaagcagaaacagcaacatcaaatgtttcctctatgtcctgtgagttggcaaaactgcaggtgtagaaccaaggtatccacatgattatttcaaatccccacatcttcttgactttttaacagagcctattaattgatacactgagataattgacacattagtaggagtctccctggccacttccagtgaactaagcaaacacatggaaagtctgacctagcaggtctgtggtccactgggacttgggagtccttcctattcccagcgtgctgctgagactattgggattacattcccagtctttggcatttccatacatgaacagattctgaatgaagccaaaatcaagtactagaggattaagtcccggaattgcaataattttgaattccatcccctccatctattgacacacggtttccaataagtcatacaacccagactgcagtgtccagctcttaaaattttaaaaacaaacaaaaacagaaaagcctctgtcttgctttatccatggaatttaaccatctagatagaagaccaagtacacaaaggtgctttgagcattgtaaaaatgtaacaaaaacattccacttcctttttaatatgccatgcaattctttcaaggatatcggaaaatagaggatgtaaaatgaggaggggtagttgacatacacagtctcaaatgttgcttcctcatctgtaaaatgggagcaagagcagtgccacttcataaggatgttttaagatctagaacataatgacaggcatatgatgacgattttaaatttgagtcgtgtttgcaaatgaaatccagaacattccctgctgctccagctgatcttgggaggcattccagtctctttactgctctcctgaaacagcgaggcaaggtccttccctggattctgcagtgttttaaagagaaatttcaaactttcccgggaggcttttctaaagggattatgtcaactgaagggaatgaacaggcaagaaacaagcagccatgccacttgacaagatgagggtggcttcctaccttcagctcattacacgtagcctgggagccccttcccagttcccatcacaccttcccatcagggaggccatctcgaaaccgtgaaatgctgctctcctccaaaggcatcaagtctcctcaaagtctgaaaccaaagtggaaggactaggaggctccttgccaagcctcctaagatcacattttctggctgagtatggcctcctcccagacatttaacattgggcgtgcctccctctttcagggaaggttgggcccacccacagggacatagatttaccaaagaggcataaatgaacaatgatcaacactctgcagcacagaacagagacacacacaatggaagagttggaaaaaaattgtttccctagagaagcactctatctatgcaaatagctaggaccactatccttctacctaggtattttttattttctctgcaagagacaaaagtggcagaaaatgcctccaaagaaagaaatcctaagcctcaagaaaaaagataaaagggaaggaagggtgttggaatacaaaagctggaaaaagaggttggcttttcaatttgggagtaaactatattcatggtccttaagagaggatggcctgtcagtgagaaacaggagactctgggaagacagaggcatgggagaaagatcgttccaaaatgtgtgagaatttcctctaacttcgttttcttctctccctagccagcctgcctcccggtatatgcatatatgtatgtatatgtctgtctgtctatgctaaggcaagatgaagggagaaaagccctcctgccatgggactttaccagcgtcctcgcatagcattcataataataaccccatcactcatcaaaagtgctctgcaggccaggcctcgccgggcctgggcaatgctctgatcccgcagccagctcaggctataattgcaaacaccctgcccccgggaagtgtcaggttatgtgaagacacttgggctttgctggtgtctgtaaaatgcaagttcaaggggactttttaacatcagaagcaaaaatatgagagtcaagagacaggtcccttgtgccctgcagaagatcacagtagagataagaagtgggaggcaattgctctgaaggtgggaaaaataatttgaaggcagcagaacagacacaaggtaattaccgctcagacacagcacaggcaaaaaggcccttgcttttagggaaacaagaagtgaacagaccaagccaggaggagaggcctggctcttatgagttgggtgaattgtcagtgtttacttcctgataggaaggcagggagagagagaaaatgaccccccaaaggccctctcaaacttaacaaatttgtgagccaagttaggtatgagtttttctcaacttttcgattcggttttggaaggacagtgtgcatgtgtaagtgtgcgtgtgtgtgtgtgtgcatgtgtaagtgtgtgtggtaagctggaaaggtcatgaaaacatgaaggaaaatggtacaagaaagagatatcaaaaatgctacctcctatctgattctaactttatgacattctggaaaaggtaaaactatggagagagtaaaagcatcagtagttgccagaggttcagggacagggagggaaggatgaatgggtgaagctcagaggatttttagaacggtgaaactcttctgtgtgatactgtaatgcagggtacacgtcattatacattgctcaaaatcctagaatgtacaacacagagtgaaccctaacataaagtatggacttcaattaataatgatatattaacattggctcatcaggccggcgccgtggctcatgcctgtgatcccagcacttcaggaagccgaggggggtggatcattgaagtcagaagtttgagaccagcctggccaacatggtgaaaccccatctctactaaaaatacaaaagttaaccaggcatggtggtgcacacctataatcccagctactcaaaaggctgaggtaggagaattgctttaacccaggaggcagaagttccagtgagccaagattggaccactgcactccagcctgggtgacagagcaaaactgtgtctccaaaaaaacaaacaaacaaacaaacaagcaaatatatatatatatataggctcattaattggaacaaaagtacccttgtaatgaagatgttgataatggagtactgtgtgtcacaggaaaatgggggactatgagagtggtctttattttccactcaaattttctgtaaacttaaacctgctctattaaaaatagtctattaatttaaataaaagagagagagaaaagatgtgtgtgtgaatgtgggatcaaacatttaaataatcccttaccatcccaataaaaagttgacagtttggtaatcagaggaaaattgggtattgtggcccaggaaagagcctcagagtaaaaatctagaagtacctggaattcaacttgggtgtagtttaatttcatcaaaatccaggaaaatagttgaagtcatcctaccccagcaaagagaaaatgaagcgtcttccccgtgcggctctgcagcagggcttcctggactctctgatggagggcggctttcatgttattgtcatttttttgttttcattccagtctattaccctactgatacgtttataaaataaaattgaaatgagtcacaagaaaagaatgacagtgcacttgggtattaaattcttgttgaggtcttcttacaaaggcttattctcataagtagcactgcactggaggagagtcactctactgaagaccctggcactgtccaaacccaacagttagcaaacacaaagaaatacaacaagggaatgcggtaagtatttcccaggaatgtttcttgtaaaacaagggcaccatctcttgtctgaacaattgttctgttccctagccttgctgtcttccaatgtactctcctacagccatcagagacatcattctaaaatacagatgtaactgtgccactttttggcctgacaccagatagttttttgggtatctcgggatgacctgcgcgttgtttagcaccttattcatagcaaactggcccctacttgcttcagtaccgggtgaaccaaggaaagtcccaactgggttctcaggctaagcaggaagactggggtttgacccaagtaatccccaagaattagcaccctagtccactaacatatactaccaggtgtgggcgggtaagccgaatttaaaaccactgagtcaagagtagtcacttagcaaattctcatagtcgggtggggatggtgagaagcatcttagaatgcccaccaaaagaatttcatttgggacaaaaggcattccatgtaaaggggccagaatgaacaatggcatggaagcaagggatagtgtggaatattcaggaaccctcaagacatcctatgcattttaggtagggaagagcctcacagcttcttttagtaaagagagtggcaatcattactaattactgcagaaatcctcaaagttgacattctctaagtacctgtcatgaagacatcctctacttgcctcaaattggcatatttggaatatgctttaattataagaacttgccagagactggggaaaatctatagaggaaagagaagtcaaatgttctgagttttaatgttcacatcaatccaatggtgtgggctttctccaattttacagatgaggagactgaagtctgagagaggacagtgatctcagacagtcacactgagtaagcagcataactgagtttccaactgaggtctacgtgccactaaaagctgtgcattttgtacaagttcaccactgtttatgcacgtaggtgtgtatggaaggtggttattgagaggagagaggagagtaagaggcaaagagttacacattttaatcctgtgttggcaaattatatatatatatatatatatatatatatatatatatatatatatataaattgaactagttaataaaaatttatttgtacagagtgttttttgtgtcaaacactaagtgctttgtatgtatcatccacttaattcctacggtaactcagtaagcttgatgtggcagattgtattatattattgtccccaattattcactgtcttctctgtaaaactatcatgtactcctgcccattgtttgtatgacttatggtgttgccctgtaggcagaatatactttcctaccctaatgatcagatgggccatgtgacttgcttgggccaatggcatgagaacagatgtgctgcttgccatgtcttaaagtttctcagctcatagcctgggtcttggaataagaaatcgcatggagcaggggcatagcagttgacctgcagctgagtgacaaatgaaagtcataagtcaatgagatactgggggtgtttgttactgcagccaggctgatggatacaaatgaggtattttacaaatgaggaactgaagttgggggagacatctttgcccaactcctaccacttgtaagtagtgtctggatttagatccatttctatttgacttaaaagtccatgccattttaattagaattcaaaaacctcctgcaaagtccaaattgtttaaagtagatcacatgaggtcacttcccagacaggaaataaagacactgcctctggagtctcggcatgttccatgtttcctgtggcttctccatccttccaagccctgagagattccagctcgaagcatccattttgttaccttaatgatttcttaaaagagaataaaatctctgaccctaccacctattcgaagcattctgtaacaacctaataatggggctccctccccccagttgtccccttagagacttatccacactacagttaggacaagtttttaaaaatgatcttgacactccctggcttaaaaccttttggtggcttctcactgctttcagaatcaaatcctaaatggcctgtctcttgccagcctcccctaatatatcttatagtgtgctgttccttgcttattatgtgccagacataataacacccttttagccaccaaatgggcctagctgtttttccccagctcatagcctttccacgtgggattccttctatcttgaccacccttccatctcctccctacagcctcaactcaaatgtcagaaatgatacttcatatagtgtttcccaaatccttttccataaccttcatctgggtcacccaaaaaaatgtattttcttgcctgcttaacattagatttgatcatgtgactaattctgggctaccgaaatgtaagtggaagtgaggtatatgcagccatccaggctgcaccatcctccagacccctcttcccctgcctcaggtcctcggcataccacttactttcatctctgctatgccactatctttgctttacttacgatatttgtcaccatctggaattatcttcttaattcattggtaccagatcattttccctctaccatgcagacttaaagctctaagaaggaagggcctttgtccatctgttcagttgcatcacagtgcccatcacagtggctacatataatagatgctcaattaatatttctgaaatacataaatatatgaggaaataaatgaatagagctcttgcaaaaatgagttaatttatgtaattagtacagtgcctgatagaaagtaagcactcagcaaatgtatctaattatgaagatgaagaattgaaacaaaaggtctttcctttcatttctgtgctatggaaaggaaggaacaaagatgaggttaggtcttgggaccaaaggtctacaaggggcagtctcagtcttgaatatagaggtggcctgggagaacagttactagggagtagacagtgagagtggactcagcttcacaagtcagaacttcttttcataacagcaacatgatgctggaattattagtaagggtctggtatgccagggccaggacatcataaaccttctgcatccacatcacagagcctcttataagaattgctccatacgtttggtagacatttactgggcttagactgtgggcaaaattttggctggattctgcaattaaaagataaataaattaccacccttgcccataacaaaccagagtgagaaacagacatggaaacaaataattaaatccaaaatatgactagtagtgtgatagcaggatggacaagaggatactggagtacagaaaaaaaaagagtgcctctgtcggtgcagtcaggaagacttcaagaggcaacttcacagatggaccttaaaaacaagtatgtttcccaagaagacacagtgggaagggcattctaggaagagggaacagtatatgtaaggcatggagtcattataaagtcttcacaaatcttggaaaaggtaggaagttctggtggtttaagcataaggtaagtacctctcacaagtatgggaatgtgtggttttgctttctccatttgaaagaaatgtgggaaatagacaataaaattatgcacaggaaaaaatgaatctactggtgaaaaataaaagatttactgattgtttttgaatatactgttttgttgtagtgtgttcattcaagctaataatagagataatttctggcatctaaactctttcaggttctttcttaaatgtattgctcaagcaatgttctactagtaaaaccgaaaactcaaagttagaaaagaatgacccagaataccaagaacctaataaccccgtgttcatattcccaaggcttcagtttgactgacccatccctttcccaggagactgaatgaatgaaaacaggacttgactgcattttaactatggtagaacactgcaggggcccctgaaggatatgtatggaatacctgtcctggagaacatcacctagaaatagattatgtataaacctgcctgaaagagagctggccattgtccactcttgaagttgtagatttccaggataaggagaatcagtatacatctctagttcatggattttttatcttggatccagacatataggaccctccttgtctgctgtggatggagtagggggtgtccatggaaagtgttttggaatccaggaatcacttgaaattgtatgccaaaatttttttttaagtagacatgtgcattttccagggaaagggtcctttgtttactggagagtttgtgtatgatttaagtttgaaagtttttctagttgttttctgttcattcgccagatcacatggaatcaacatgttttcaacttattgttctgaagcctgggaactgaacaagcctgactctcagttcttggcaaaggatagagcattttcctaggcagtctttcagaaaatcctgctatttctccttccaaaacacatctcaaatttgtcatgtgtctccatctccatcaccaagcccctggccaccaagcctccccatcatctctcaccagaacaaatgccaaagacttcaaataggtctcttttgttcaccctttccttgctgcaatctaattttcacatagcatcttgagtgacactttttaaaatgaacattatgtcaccaccacactgaaaattctccagtggtttttcatgttgccttcaatataatccaagtttctcagtatccaagggccctaaagccctagatgaccaatttcctttgcacttttacaacctcaggtgatgccaccttcctgtttgctcactagaatccagttaggctggacttacttctgctcctgatcttgcccagctatttcttaatcccaggcccacatccatggagttctaccttctggaatgttctcctttcttcatatgattagctccttgccatcacttaggtaagtctcaacttaaggatatctcctccatgaatctaatttttttttttttttgacagattctcactctttctcccacccaggcagtggcacaatcttggctcactgcaacctctgcctcctgggttcaagcaattatctctctcagactccagagtagctgggattacaggcacaggccaccaggcccagctaatttttgtatttttagtagagatggggttacaccatcttggccagactggtcttgaactcctgaccttgtgatccacccgtctcggcctcccaaagtgctgggattacaggagtgagccaccatgcccggccagatagatctttactgaccatcctatcttggtagtttctcattcttatcacatttaatttttctaattataaaatcctattcatttatcacaacagttttttagaatgcattttatgattgtttattttttatctgtattctctactagataataacttttcttcttcacagtcacatgtccagaccatgatacaacacctgccacacagtaggttgaatggttggataaacagggtaatagatcaatgaatgaatgaatgaatgaatgaatgaatgaatgaatgaacaaatgcataaatggatgaatgaaaaaataaaaaagaaggcctgtaggcagtcttcaggctccatctttctgtgtagaactaatgccaccacccaggtgtgctaggctgtcagatatgcgaggatagcaatggtggccaacagggatatgagttagaaagagttgagaagggcatgctaaggacaattaatggttgcttgttagagggtgtggcctgcagtccaaaacaccctattctcaagggcttgatgtgcctaagtttaatttgaggcaacggctgtatcttggactatagtaagggaggcaggggaggggaggaggattttcagactgaatatagtgcactaacgggctaaaaggaaaatttggaaggtcttcagggacgtttccttgatcaaggaaacctgagagtagttttagatgagcaagagaagggttgggatggaggtgagaggtgacgattatctgatattcaaccaaagctcaaaacaaatggctcagggatgggtgggagagatggtcaccttgtcctcttcctctagccaggctgacaaaccatcacacctccagtaaaactcacaagcattgctgctgttcatttcttaccttctttttccccattcctatcaatgtctgactcaaatctccaatcttatctgtctcccattcctgcccctacttgtaaagctgaaggttgcttatactggatcccaggctcccttatctatccctagcctagtaggctcttacctggttctccctcttgagatactatttaggagggttccttaacccaaactctgtcccctggaatcaaataatctttgtcctgtgatttgtactctagtcaggtctgctcaggtctgagagggggaatttgagggccagttcctgttaactattataactttgtatttagggagggagtatagcttactagttaaaatcatggtctcttaacccatgggtcatcctattaattcaaacctcagcaattccgcttaggtgcaacttcaaccaaagtgacttctcctttccaaatctcagtttccttatctattaagtgggtaccaaatagtctgttcctcctagggttgctataaagattaagtaagatgatgcaattgatcttccactcagccccttgaatttttaaaaagctcaagctgatttccagctcacataacctgcatcaatatgcctgaatgtatgtttgtttgtctgttttaaaattttgagccataattgcagaaaatcccattgcctctccctctctctgtctgtgtgtgtgtgtgtacatgtgtgcacatgcaaacacacagaaaaccaaaagtgcaaaggagttacatcactaggagcagggtccaaccagtgaccatggtacaactccctcacatttcaggtgggataattccaaagcatgtgtattgcacagtattccacaactccctcagagaaattagttttcattattactatgatagctgccttgataccacactcattattgctcctttcatttccttgtataatttccccacttccacatctgcgttagacatcccaaataaactatttgagccatattcttggccttaggatctatttcatggagaacacaccccaagacaaaattctcagcatagttccaggttctttgtaaaccttcggtattcaatgactgagctattattgttatgggagaaacctgacctcatgccagtaggaaagacctcactctacgccacccaaacactaacaaaaggaacatgctgcccatcacagggaataatcagcctaggtctgccagcaaattgcagtcctgcctgcacgggtcactagccaagctgcctccttgtgctgtgagcccagaaactactgagggacaccactaaagtgttcctttttggcacaacaccccagcctccagcaaagcagactgcaagactggggaataagcctgtctcttcaggtggggtgagaagcctccctgacctgcccagaacaggtctggccagtgattgctccattgttccagatgccaatcaaaggcgaagccagggcactttgtccaaaaattggattaagaacctcagttgggcacaagcaacacccataaatctgtctgtagatcttttgcctgttacccattttgcatcctcagaagttaccctctataaaatttatctcccataaagagagtttcaggggattatccccaccaaagacctttcaattttgcaggcagattgccaaatccacaaactgattccagcccagatgtcctgggagtacactcttcactcccttggccatccctgaggctgcttccatgttgagtacttgcagacacaggcactacagaaccacataagttctaggcaaactccagcctcaggtctcctggatttccctaatgtaagtgaaaacagagcctcaaaactctttgacccaactggctggctctggtcactctgagcattttcaactataagggcaaaaacgttttcacagagtaaaggcaaagacttaggtacaaagaaaactcctcaattcctctatgatccaaaggcatctcagctttaattccagtagtaaaaaacctcctgaaagcaaagacccctgacactttcctctcacagccagcttccagattctcaccactctctcagccactccctaaagaatgttccttgtccatgtctttgtctgcttacagactaacaacatacattaaactgggatcatatttgactcacataaattcagcatccactgcatgtccaacaaggtgttgcttgaagtatcacataatcactaagagagtgggctctggtgtcagattatgttgctgcaaatctgtgctgtctctttctaactctgaaatcttggcaagttagataaacctttctgatgcagttttaatacataattccaaatattttcctcttctcttattcagaggtggagattatattcccttccctcaagtctaagtggacttgtaactgattgaacccatagaattcagtagaagggacactatgtgacttcttccaaggctcaattataaaaggccatgcaacttctgcctggttctctgggaacactcacacttggtgtattagtccattttcatacttctataaagaaatacctgagactgggtaatttataaataaaagagttttaattgaatcacagttttgcttggctggggaggcctcaggaaccttacaatcatgatggaaagcaaaggggaagcaggtgctttcttcacaagatggcaggatagagatggagggagagcagggaaaactgccttataagaccatcagatctcatgagaccttacacagtatcacaataacagcatgggggaaaaccaccaccatgatccagtcacctcccactggatctctcccttgacacgaagagattacaatttgagatgagatttgtgtggggacacagagccaaactatgacacttggagtcctgggccagtaagaagggtgactatcctgagaccagcatgctggagtggtcatgggtacgtgcttcagcagcagcaccagctgaactagttcttcagccatgccagcccagacattaagcacaggagtaaagaagcatcttagaaatggatccactgtttccaacccagctgttcaagttatcccagccattcatggaattccagccaaggcaccagacatcataccaggggaaaactgtccttctgtgcccttcccaaattcctgattctccaaatccgtaagcttactaaaatggatgttttttgctattaagttgtgtgattgtttgttacacagccatagccaacttgaacattctctaagcctcagtttctctatctgtgaaatggtgccaggaatggtgtctgccctatagagtttttttgaggaataaataattgctgtgcatctagtacaccataatcactcagatgctggtgattattactatcatcaccttcatctcatttaactgaaaaacatatgagttaaatctttttgatgaatatctcctagttaattgttgtgcaaactgtctcttctaattagatgaataaaagttattgatgaaaaagatgagcccaacttttaactaaaaataatatgtctataaggtatcagaatgtcatcagttctttaaaaatgcaaaaacaggtttggtaagtgtttctgtggtgggagggggcgatatctatatgcatctgtgacttcatgtttgctttacattcttctccatgcatatgtttgcaaaataattgacagaggcattacaaagggcaaagggatcgtgtgtatgtacacatgcctgcactcacagcttctatagtagttgaagtacccaaagtggtaactgacactccgattagtcagcttcatcattcccttccaagcctaaatgcttttattttctcatccacagatcgatatggctggcaagtaagtgtctgtctgccacgtcaggacagtgagacccttgcaggtcagatgaccttagcccctcctgcgagtcctcaagcccagccacgctgagcaggtgtctgagaagtgggccagaccacacttgagcatccagccgtcagcgtacaaaatcagatctgatcggcctgcggaagataaatgagctggagtccccccagccccagatttggtcatctctttatgagctctgaagggcctattagcagatctgatgagtgctgggggagatgaagtcggcctcgaacaacgttagctggcagaatcaaatcattcccaatccccctagggagaaggagatgggctggctttcagaggcagcgtcctctcatctccattgcctataaggtttatatgaacactcagttgggggaagaaaaaacgctaagccctttttttttccggtagaatcgactaagaatttcctcatatatctaatagcttctcctcaggcaatttgatgtccctgcttagacaggtgctctctcattttccctctcagagtctcagcttaggagggagctgcaccactcagaagggccagctgaagccagctcccttgtcaccctctctgagccctgcatcccactcagctagaaattggaccagccttcagggtgccgagtggagcctcttctgtgaggccgggcggcttggtgggagccacagggcaggggatcagaagttcagttcttggtagctggatgacagtgggcaattaatactatgcagccatagtgaactcctctgtaaaatgagacagcagattttgtccggacttggcagtgtgaagattaaatggaatcacaggtatccagctgatgagatgctcattgaaggaccctttcctttctctcattcagcattaacaggcagtctgcctttccaggcccaagaaaggggtatctggaagaggcaaatagcaaccccaggggcttcaacagcttattagaagcatgaaaaggaagataattaaatctagggcagactttgaagagaaggaaacatcttcccaaagaaaagaaaactgcaagctgataaatattttattccttacccccgcatctgggataacatgaaatagaccaaagaagacttaggtgtgaatcctgacttagtaattgtgtgtccttggcctggtcacttaccctcttggattctcagtttctacatctgtaaaataggaacaatcaggctatttatgttgtaaggaaagtatgcaaaagtgcctaaaagagtagctgacacctaggatcaggtttgccccaagtatcagttaccttctcccttattttcttttttttttttttttgagacgaagtcttgctctgtcgcccaggctggagtgcagtggcgcgatctccgctcactgcaagctccgcctcctgggttcatgccattctcctgcctcaccctcctgagtggctgggactacaggcgcctgccaccaagcctggctaatttttttgtatttttggtagagatggggtttcactgtgttagtcaggatggtctcgatctcctgaccttgtgatctacccgcctcggcctcccgaagtgctgggattacaggcatgagccaccatgcctgaccccttcttttcttatttgtctgcacaacttgcaactgattgcctacctgccttgcctcacagttctgtgtgtctgtccctgtgaactctcacattatccttcctctgtggtaaggctactcatctctggctgccttcttgctcaatatttttttcttctctgtagggcaggcagctctcgtaatcctcctcaatttttttttcttttttttttttgagatggagtctcactctgtcacccaggctggggtgcagtggtgtaatctcggctcactgcaacctctgcctcctgagttcaagtgattctcctgcctcagcctcccaagcaactgggattacagatgcacaccaccatgccagaccaattttttttttttaagtagagacagggtttcaccatgttggccaggctagtcttgaactcctgacctcaaatgatttgcctgcctcggcctcccaaagtgctgggattacaggcacgagccacctcttgacattgtgatgattttttgtctgtctgaccaccctacttgactgcaagctccatgaagttgggggctgtctgttactgactaaataacattttaataaaagttttaaatattgctttttaaataaattgagagacccttgcacactaagtgcagtgccaaggtatacaattgaggagagagaatgggacaaaaaagaagctgccctctgaggacttaaagccttcctttgtgggagacaaaaaacaaagccaaaatataagtaaattaaaagataattaatgtctgtaacatgtccttacaaggacagaaaccaacaggctgagatgagagaaactggaggaagtcactttaggcaggaccagctttcaaaagaggctccattcatggaggccatcgcataagacacatggatgacatgaggaatgaagatgaaccatctttcccgaaagtcaggaaaagagaattccttcaggcagagggaatagcatacacaaagatcctgagtcagagaagagcttggtgggtttttgagctgaaaagaagtttctgtatcagagggaagcaaatggcagggagagccacgtctggtaaacacaaggaatgagacaaggagtaggtcacagagctcagcagaacaaaatcaggtgtttagactaggtgtcagcaaacggtggctgtttttataaatagtgcctatttttgtaaatagtgttttattagaacacagccacactcattcataggcacattgtctatggctgctttcaaggtgccatgtcagaattgaatagttgctacagatacctcattgcccacaaaacctaaactatgttctatcatgccctttacaaaaaaaaagaagtttgctggcccttggtttagattatgcaacaagaagtcagtttgaagggcttttaactgaggagagatgtgatctgattagacactcagaacagtgcctggcacacaccagtttctcaaatgtgttccttgaatgaatgagtggatgcttagatgaataacgcttcattatccacaaccatataatattatcccctctgttagcacaaataatcggagggtttacaggactgagtgggagcctcccatccatccaggcagactacgttttccacagtgctaacagctgacggatacttagaaaattgaatgttttatgcagcttcagattggaaatagcagtgtggttttcaccacagggaaccctcttaatgtaaatccaacccaattacacacacacaggcaggcgccaaatttgcagcaagactgagtttcgcccagcagcaaatgaagcacagctccagagaggaaagagaggtctgtcagcgagggtgtgggagctgcagaaggcacctcaaccctaagggccactgctgtgtgtgactcatgtgtggagggtgctgggtagcttaaagagcctgaaagaaaaaggatgaagtggcttatgcaaatgtacagcaagctgcattctgcaattgcaaaatcatgaataggggaaattgctggaaaatcaaaagtaacttttgcccccagagggtccttcctttgaccagttacagagatgaccaaagccttagagaaagagactgagcttttaaaataacaaataattgcaatgagctttgtgagatacgcgcaagattagatatatgaaataatgaggtggagagatcaaacacaagaactggttaaattaaatatctgctttgggccgggcatggtgactcatgcctgtaatcctagcattttgggaggctgaggtgggaggatcataaggccagaagatcgagaccatcctgaccaacatggtgaaatcccgtctctagtaaaatacaaaaaattagccaggcgtggtggcatgtgcctgtagtcccagctactcgggaggctgaggcaggagaatcacttgaacccaggaggcagagattgcagtgagccaagattgcaccactgcactccagcctgggcgacacagcgagtctccatctcaactaaaaaaaaaaaaattctgctttgtggtcagggtcccatatcaccaccaaccaaccatgtagccgccctatcggggtaatgcctctgagcactggagggtcctccatttaacaccccctcccacaatatagacatgggggcatttgccaccatttgctatgtattcagaggtcccctgaagtccaaaatcaaggtgtgggcaggacaatgctttcactaaaggttctccagaaagatccttccttgtctttttctagcttcatttttttttttaattttttatttctaatttttgtggatattgagtaggtatatatatttatggggtgtctgagatgttttcacacaggcatgcaatgcgtaataatcacatcatgaaaaatggagtatccatcacctcaaacatttatcctttgtgttacaaacaattcaattatactcttttacttactttaaaatgtacaattaagttattagtgtctatagttacgctgttgtgctatcagatattagatcttatttattctaactgtttttgtacctattctttccctagtttctaataggggcagcaatccttggtattccttggtttgcaaccacatcactccaacctctgtctccattgtcatgcattcttctccctgcagatctctgtgtccaaatcacctcttcttgtaaggataccagtcattggattagggttcactctagtccagtatgatgtcctctgaacttgaatacatctgcaaagaccctatttcctaattaagtcattttcacaggtgccataggttaagatttgaacatatcttttgggaccacaaagttttaccctctgtagagctgtaagctgaggtcctatggagggaagaacccatggcatggatttggcattgttcccgccggctggagagggtacctggagaaggcagccatactccctcttgagtgaaggccctgggagtaggtgatctaagtgtccactcataatgaaaaccagagctcagaagactggaagtctaacccaatacaactgcttgccaccaaaaacaccctattctccagaggtctctgtgtcagccttttcccccagcacttccccagacaaacacttccctctctacctcttgtctactctgagtctctgtcatttggactttggcctctagattccccttcttctccagtctgccagccttccacccatatcagaggccaattctcctcttttccttctgtggccttttggtcacatgaaagagactagttaatactcaaaatctgagcccaaactgattgcccttcatcgaagttaggaactgctgtgctaataatgatgatgataataataataataacggactaatccacattcctggggtgaagatatttttcttccatcttagagaaagcccccttctgcccaggaaacatctggccaagtttctaatgtagcaaataaaaataggttgaaagtcacagcaatggaagttggaagttcctctgtccttcaaacctttgtcaatcagtgtgatcagtccctaaactctgtaatcttgtactggaaagtggtttcctgataggcctatcatctaattttaaataaaaaacattcactcgagactaaggattcagaaaaagtcgtctgcctcaacatgtcccaaactataacgtacatcagatcacctggggatctcgttaaaatgcagagtctgattcagcaggttctggatgggatttgagagtctacatttctaacaggatcctacatgatgatgctgatgttggtccccttaccacagcttgggtatcaagggtctacataagccctgtggaaagaggataattgcttatccagagcaatgtgtgttccagtcagaagaccacttgtaatgctgctctgttttaggcaatataggaaatcatccaagacaagtaaaaattaactcttgggcattcattgtattgtagaaagctaccttcttcatgaacaaaaagtaagggcttataaatatatttgtgttatcctatattggcagccatgccaaccaagtttctgccccacatatatctttatgaaaaactatattactagagaaataaagattttgtgatttcacaatagacctgattatggcagaaagtgggagaaaggttttatgcaaagttttatgtacatgcaattgcatttaacccttgctacaagccaacaggaaaagtgaagaaacagaggtcccagaaagttccctccaaaattggctctgagctccaaaattatttcttgaaacacattggccttcatggtctctgttaattgattccccactggtttttcatcattgatgctaaggcccacgttgtccatgtagagactcaatatgagtcaaacaaaaataagtttgcatccttgctgtctccttacacctcaacttactcccattaaggctgaagatattgtccagaccactccacagagctgatgggagactccacctaaggagaaactgccctgcagggcccctggagggagacactcaatgccaattcattttcccttcaccctacagtggaatcagaaggaagggatgacagaaacctaaaatcacccatcctggggtccccggagatccactgcccactcatttcctgcatgtgccaacttcctctccacggagtccagttacaaggcttctcacccatgacagcagggcagggagtggccagggctgaaataaaatagtgactaacttctgaataaaccaccggggtgcctggattgggacctccaccccatcctataactccctgacctcttatgggtggaggtggaggggaaatgaccaacagaaactgacttaagcatatctgaggtagctaaaaatgctaattccttcaaaacctgtacatggcatggttttccactgaagacctcagctctggaacctgatttagaattctggcattaccttttctaggtgtatgacctgaggcaaggtgaccctctctatacctcagtttcctcatccataaacctcataaagttattataaggtgcaaatgaattcatgtttgcacctacttaagtctttggctcatagtaagcattcaataaataatagcggtactattatttatgttttattaataccattgacagttccccctgccaatatagcttacctcctttttcctcataataggatttagagaatcagacactgttcaacactatagttgttgttttttctttaatcccctagtaagtacagtcagaatcccagggtgttcagttgaaataaccactgaaagtaaattccctagagccctggaacaggccagtcttggacagagtaataagcaggtctgatcttaaatgctaaatctcataggaatgtgtatgttccaggatcgtggtgttgagaacgagtccaaggtcctacttagattcaatggcaaaaacaaacaaacaaacaaagatgctgcgaatgactggtgatgaatgacatggctacatgagaaattcacaacaaacaaaatatgctactcactttgctttccatggtggtgtgggggacagagaaccagcctttgagtcaaaagagttagattcaaattctgactctgcctcttaatggaaggtccagtattagaaaagtaacctaacattctgggtcttgatccacttatttttacgagcagtggctgctctcattatgttatgaaaataaagctttagacacagaataaagaatagtagtatcaatatcctctctctcctccccactctcccattccccttcgatctttcttcctatctttttctttcttccttttttcctttcttcacactggctagtcttcccattctttctttctctgctttccctgttggcccgtgctcataaaatttcgccttggacaggagcacttcagcccttgccccagagcccatgtattgacccccagttccaaatctacaaaatcaaggaatcacaataagagtggaattccctaagcaactttgcaccccaaaatcaatcaatcagtaaatcagtttggtaaagcttaattcctcaaagcttctggtaggtattctggaaaagcgataaaccatttaatcaccaccactgattaagctccttctatatgccacccctgttttggtcattgaggatacagaaatgaaagagatcgtcttgtgctgaaaatgtggagtaactaaagtaccttagggactgatagcaggattgctagcagaggtcacagctgaattgacccttacaatttatttcagcagagcggtgagatagtatacgcaaggcacagggacgcccaagcagaaaaacatgaaatctcagaggtgtgtgcattctaccaccaccaattcccccttgaagtgccttcttcccactcctgcgaccaaccttccctttacccacactccatttcttggaataccctctatgctccatcccatgatccaggcttatgctcctcacactggttacctcccccaatatgagttacttagcctgtgtctactaatctctggtctaactgccatataatccaccaacccagttcagcgaatttcaaagaataacccaaagggaacacccatatcagaatctcttagacagcttattacaaatgcagtggccaatgccccacccatgattttctgaatcagaatggggaggaaggagtaaaaaaggagtctacatttccacaagacccctcattgactctactacacactcaagattaagaactacagatctccttcttgctgaggtgacactagctgataacagcctatccttcctgcgaatttactgagcacctgctataactgggcattctgtgagaacattttgcatatatcatctctttgaaagttattgtgttattaattggtgcactggtataagccaggcccaaatatttttaaatttaattctcccaacaactgcactgaacaagaatgaactctgtaaggcgttccttcttcttatatagtttgaagctggaaagcaacacaaatagctctgttgtgtacatatcctgtaccccagagactgaccttgtggatcgatccatccagtatgaacaaagagcagagaagaaagaaattcacccacagtgatgtgggttgagtgggcacaaaaggactcagatattatcccctgaactttcatttcagcctgtgagcctgtgtctttgacaaatgaaacagtcagataatgaaagagaatattcttagcaaacttctgcttctacatgtagggtatagggtatgagttatgctacagggttcttgactaagacagacttgagtttaaaacaaagctctatcactgttcgtatgtgagattttgagtgagtcaggtgagatacagatgatatgggatctacccaaaagggctttggggaattcaaagagatagtacatgcagcattttcaacacaaagtatcatgaggatgaacgtgggctttgtggcccccactctaatattcacacccagccacacttctgtctgtgctcaaagaatccccaagccaagacaccctgtgcattttagcagaacctcatcatctgctttctcttgtctttgtgttctcctgaagctcagaatttctcagcaggaaggtgaactgccagacaagaggccctcatcgcttggggatcatcatgaattgacagaaatccccggggagtgcccagcacagcattaagagggtttcaagagctggggacagaatgagggtgatggggaggcagctctcgctaatgggctgccttcagcctggctttatggaaattacaacactgagcctcacggacctgggcaagaggaccgcttctgagtgagtgggttggggaggggttcggctgcttccattgtggatggaagagcctggctgagctgaaaggggagctgagagatctgccaggatgggacaaagatctccttgcatttgccaacaaagcacatcctccacctccagccccttcatacacacaaacaccaccccgggttataagagtgatccttatccatgatgtcagggacctcacccacctcattttcctctctaaccatctcaaagaatagttattgaatgaatgaatgaatcaatgagtcaatgaatcaatgcatgaatttaaagaacccgaaggaccatcagccttgttttcagaagaaatctctcagttctgaaatatcaaatgggatggtcttctcacatatcgttgggaaaaactaaagaatattgatgccttctctttgagtgtcaagagctccatctaggacacttaagcatgttctttcatttaatctcctcctgacaactctatgaggtgtatattcctaccttcattttgctcaaaggagcctaacctgacacagagaggctaagtgacatgtctataatcacacaggaagaagtagcagggctgggttatgaactcatgatgctctgatgtcaaggctggtacttatttccactctgtctcctcaaggctctgtatattcctgtgaccatcttacagtcactgggatttattgtgtccttctcatctatttatacctcagaggaaattaaaagcatcatgtttttctttgtactattgaaccattttcacctaattaaagctagataaactctatccaatagaaatataatgccagctaaacatgcacgtttacatttcctagtggacacatttaaaaaattgcaaatagaaacaggtaacctcaagtttaataatatattttatttaacccattgtattcaaaatattgtcatttcaacatgtaaccaatacaaaaatcaaatcatgatgtaattaacattattttgtgctttgaaattcagagtgtgcttcatacttagagcatgtttcaaattaagccacatttcaagttctcataggcacgtgagcctggtggctgccatattggacagagaactcttatagggataagacatgggatccatcagcatcgaggagagaaaggagaatagaaggggcctgcagcactgctgctggtattctggtctcctagcccctcctgcagtgctcttggatagaaaaaaatctgcgaggtggctgccgcagttgcaggctgcctgctattcacattcctaaaggaagatcagagagaatccagagatgtcacaatgctgggtcacatccatttccccactggagtttctaatcaactcaagaggcctataatcctggctgagctcctgccctgggagggcctagtttgtccctgtgtggtatccctgtctctccttcttcaggtctgagaacctgagaagattcccctgggaacccagcagcataggcagtcaagtggcccagatcagtaggtgggctgtggactggggatcctaggacaaatccaacaagcaagaatccccctccaccctccatggggcacagttctccttgctggggctttctgccaacactactatccttgctgctcaggaacaatcattggaactccacactggaagcttctacttgctcctatcacaggccaggctgggccccacctttgagtatccgcagctacacatggaagcctgccaggttaagctgagcttggcacattgagcctggaaccaccccaatgctttgttggagaagggaagtgcccaaggcccatttgctgagctaccattcattcccaccaggcgcttggcaactgtcagattaataacagtgactgaataatgtttcctgagcacttactatagcccaggctggagcaaagcccttaacgtggattaccttgttgaagccattctccatacagcagcctgtgtgagctttatgaaacacacaattaatcgtataacccccttgctgaaaacgatgaattcccactgtgcttggaataaacagccaaatccttaataaggctcctgaggctgcccagacccttacagtctctgcagctctgtctggctcacactcccccttctccctggtctctgacagtgctcacccccttggtgttactcacaatcattgccagctgatgagccgacttggcagggctgggtgtgggcttgtgctcactctgagacagtggcagacgtttgtgggctgtctctgatattgactggcagcccccacctccttggttgtcatccagggtggaaaacactccaaagcggccaattactattcactgtgacttcacacacaccacacaccacacatcagtgcagacgcacacccagaacactgctctttcagcttttaagcttcttcaacattgctcatgctgtaaattaccagaaatttgcagtggattatcccagttagtatatttcccatctacaggcagtatcatcaccttgctggccaacagaagagcccacccctgtgaattaaagggactcttgcttcccaggacctagagaagcttgccctggaagaaacgtaatgattcctactctcacctgcacagacaatgctttcactccagcagcctcatgaaacagccagctaatccatagtccattgtgatgaccacctaacagatgggaaaattgttgctcagagataggtaacaacttgctcaaggttatatggtcaagaagcaacagaattgtgctttgcctatgtgttggcctttgaaggaaaggtcaggtctgggctgcagaggctctattgtggggatgagcctgtaaacctgagccccagcctcctgcagagctgtagggggctgcagtgcccagaggctgaggattcacttctcaaccttggctaccagtgagagagcaggctcattctcctctccagaagacttttttttttttctataccccaagctgtgactttagtgtccatatcatcccaccaaagacctctcaagccacactgaagagaagatgagttccagggtaggcccccctcagaagcctccaaggccatcactaagtgctgtcctctccatcttcaagacatttcccgtctgattctttctgcccttgcctttgccctgtgccctagctcagggttcagtgtcttttacctgggctagtgtcccagtccctctctggcctccctgccttcagcctcaccatctccagtccaccctggatggaggtttcaagagagaagtttctcctggtgattcctgcttgtacctcccattccgaccttccctattccctccagcatgtgtctcttaaatgaaacccttgtaactgaacctgccccttctacccagcccatggtgactcctaacaaagttgtaataatcactctggtgttcccatttgctcctcacatctgctaatgcagggcccatggtctagtaagaccctgagactccagactctgcttccctgcctcggagaggacactttttgagccctttccctgcactcactcccatcacctgtatccctgtgtctcttttcttcctctgatcacctgtacagtgtgacctaggagctggtgcaaacaaagattcctgggccctgcgccaggatgctttttttatgatatatatttaaggtgtacaacataatatttgatatacatatacagagtgaaattgtttctacagtcaagtgaatcaacatatccatcatcctgcagttattttttaaaaacctaaaatctactctcctaggaaatgtccaatctataatataatattgactatagtgtccttatgctatacattatatctctacacttacttatcctgcataactaaaactctactctgtgaccaccatctccacattccacaccactcccagcccttagcagccactggtctactctctgtttctatttgaatgttttgttgttgttgttgatgttgttgttgttttaagattccacatataagtaagatcatgtaattttttctttctttatctggcttatttcacttaagcacaatgtccactagtttcatccatgttcttgcaaatggcacgatttcctttttaatggctgaataatatttctgtgtatttggggtatacatattttatatatattcacaatgtctttactcattcatccattaatgggcacttaggttgtttctctatcttagctattgtgaataatgctgcagggaacatgggggcacagatatctttacaaggtgctgattttatttattttatttgggtgtatacccacaagaaggattgctgggttatatgatagttctatttctaatttttttaggaacctccatattgttttccatgacagctgtaccaatctacattcccaccaatagtatgcaaggactctcttttctccacatccttgttaaaacttgttacctcttgcctttttgataatagccacttgaacaggtgtgaggtggtatctcactgtagttttgatttgtattcctgatgattcaggaagctatgtttttaacaaactcactggacaattcacaagtccttgagatccatgaagtctgagaaccactaacccacaagcccttgtcatgggatatggcatgatccaccttggggactgagggcgactgtcttttccctatgtgctcttgaaaggccacttcagctctctgcccaggagccctctcctcctttatcatttacgaaatgtctccccttcctccctggtgcagcttacttgccactttctccaagaagtcttcctgggctccacaaagctgagctgctcatgccctcctctgtgtacttaacaggaatctgctttttattctgtgatgtgtcccaacttcctctgtgacctggagatctggagccatccagacagggtcttccactttagatgaaatggaagggtggggagaagggcaaataatggcctgaaaagaaggtggcccttcctgatcatccactacacatgttcacattcatcaatgactttgttctttcctactaacctataaggctggagctgccattcaggttctaacaggcgaggacactcaggcttgaaaagcacaatatggaggctgcactgctgataaatggcagagctgggcctgcacttcagctcctctggactgcagagacactgttaaggcatcactctgagaactggagacagtggtcataaaacggctgatgacaacctaagaccttgattcttctgctgtgcattttcagtccctgagctcccctctctgtgggcagcacatgcatgactctgagccaagcctttgacccagggtgatgctcatctgaagcccagcgtcaccatcataagtgtgggagccattctccacttaaatttacagacctgctttatactcccacagaaacgcagtcagaaaatgaccctcacaccaggcatccatcagaaatctgtgtgtaatttgtctttattacgaggaagaaagggttggcggagaggcgggtgggaggtggagggggagaaatcaatttgatgtcaggtttcaattgttgagttactaatctaatcagtgacaacttacccttttagatgtacggcttggctttccaaaaattagaaatatcctctttttccaaaaggctgttggaaaggagataattaccccaatacaatctgtgcttattctcagagttgtgttttttttttctttaaacacgacaacatttcctacatgtgttcagtgaagctgaaaatgctattttgataatgggcccacagaacgtttaacaggcctggatgacaatgtgagactttcttaaggaatgaggaggcaatgaaaagctattataggagtcattaatggggactgggaggtctgctggagacatcactgcaattctcagttttgctgttttcttaataaggttctttggagatcagatctgaagcatgatcttgccaaaacccagagccctcagccctgtccttactcaacctgaccctcccagctgccaagattgaaccctcctccctcaacaccctccccatttgataaagattgactaagcacctaccatgggccaatttccccattatgtgctggcagtgagttgaaaacagtctttgcgcctacacttcacagccccagaggaaggcagataaaaaaggagagccacaatcccacatgatgtgttccgtgatggggtagctctgagagagcagaaagtggggagcagctacagttcctggtcttaaaagatgagtagaattttcttagtgtgagaaactgagcctcattaatctggcttcagtcccacacccatccctgaactgaggcaagaagtatgaaatatgatctgattggccacatggtcacatacctagccttgaaagtgacaggagagtcaacccctggaaaaattcattgacttaaaataggggagaggtggttctccatagaattaggggagaaattctgttcccggaagcagagggagtagatactgaacaggctaaactagcagctgtccactaagcaggcaggcacctgttactgccaacagaggtcatgccatctttcagctctgcagctacaaaaagccacaactcctggaacttggctccaaaaggagttactttctatcaagccagtctcaataaccctccatttccagttctccccagaataatggggagcttgcacctccaagagtgtggacttggttgtcctttcagcaggaagagaggctaaaattaccttgtcattcatcctggtttcctagaataataaaaaaaagaaaagaagacaaaatggagtatctcaagaaactctccacctgcattaaacaacaagccagggagaacatgttactctggagaagtatctaaaagtctagaagccctgaaaatggagcaattcattttgttaagaaatgggtgaagaatcaagtaaacttatggagaggaggttatgctaggagctaggctatcatcctcaaagaaatgaatcctaataaatggcccacattcaaaaaattgatgagcaatttgctttctcatctggttcttgggagtatgcaaagtacccatgcacatgtgactttatgttccaaaaaagccccagaattgggaaaggttgcatttgataacaagaaaacctgtcccaagagatcaagcaaattccaaagtagtttttaggggtggcaatgtaaaccataaccaaggggacccattagtgtcaactgtattcaaaggatcataatgagatggaaacaactgcattatccagccagttgaagtcaaaattcccccgagggaagggctatctttgtatgagaaaaccatgataagtccctcttaggtccagacagctccttaaaggacgggggttgtcttgcttgggataaaagaaaaatgtactgacttccctcccacaacactgaggagggaagaagacaaactagagaagaaagagagagaagaaaaagtataggaggaaagaagagacagtccagtggatccacagctagtgaagatgtgcaatgtgtacaaatcatttggaaaatgggtatcttcttatccctttaaattagtttgttcctgtgatggaaacccttcctccattctgagtttgattgaagcacatggctgtgttttccttgtggttgttttggtttgtacgtcagttgattttgtttggtagaaagatgtgaagaggctatatctgacacctaaatcagtgtggctcaaaacaaggattgcatattagagatcagaaaaattatgaaaactcagggagatcctggagaaggccacagaaatggatatttgaggccatcttatcccaatcccaaggaacagggaggctgacaactgggctgtaaaattcaaaaatcaagaataaatgaattacatttatttcaaggtcttttccactgtaatataaaatatcttttgacaaatctgggtaacttctatcctttttttgtttttttagataccagacttcttagcacctttaactttttgcatgcaatcggactctccaaaacaccttcttcattctgagacaattatctctgtcttgcgttattctatttcttataccggtaggttttctatagaagcatttttcaaaaaccttattgtaacatctctgaccattttgcatgtgtccttatgccctacagatctggaggaaattaggaatgtggaaaagccacaggtggagatggagagaggatgttaagagagcctgagaagaaagtgggaatttgatttcacagggtatgtgacagcctagcccctgagctccaagtaagcaggaatcctatccgccttattcgtcctcatccctatgtcctcaggacccaggaaaattgctggtgaaatgcataggtgctcaataaatatctgtcaaatgaataagtgaactcttcagagctccgtgaattaagtgtatgacctaagaattaagtatatgactctatgattcatatcaacatagaaactaagcctctaaggagtcaggtggagttctccaaatcacagaatcacagggccaggataggaatggaagaggttttggctgcagagcctgcattattttcagcctcacatactactctctcttcctacttcaagagctatccttctgatcacctttgcccccagctttctgtttctaaacagtgatttaatcctcagcccattgcaacatttagaacggtggtcctccaccattagaaggtattagaatcatccagagctgaacaaacaaacctgaacagttgcaggtttctgggattcaatcccgagaaatactgattttgtagtgggctccaccccccaaaatactgatttcatgggcctgaatgagactttggaatctgacttaacctgggtccattgcaggactaatcccttcatggagggaccattttagtagcccactcagcttcctgcagatccctttcttatttttgtgtgtcccttggagcctatgatttttttttaggggaccacctttgtgctacttgagctttgtgctactctgaccacatttacaaaaatccagaagttcctaggaaattatgttctactggaaacttttaactattgagattcgagtgaatttttttggaaactcaactcccttacttcaggtcaggacacttctgaggtttaacttacactccagtttccctgtgggatcaggctgaagtcaacttccacaggtctgtgcctgagatcatgcccttgcttggcttccaactcttcccggtctaattttcaccttccttcccagctttcctttcctaagttacctgcaaatgaatcctcatctcagaatctgtttctggacagtcaaacccaaaacacacttcctgtctttagtttttcattgcttatattctaccctgcccaaacttggtcttccagaaagttgaatatgaacaattcaactcaaagtcaacacaatgtgaagcttaaaagtaggttttcccctatccctgaagattatacctattttgagctgaccatctttgaaactggtggagtcaggctagagagtggaaggaggtgtgcctctcttccaagggacaaaaatcttatacccgatactaagggtcagaagactggactcttaattgcttttggagggtgatgcaagatcgaggccatctccttccatgagagctccccttctatctgaccaacctgaagccagacccatctgcatagacctcactaggtttcacccctatttttcctccttacccctgtagaaatgcacatgacctctttatgaagaccccaaagttcatctgtcattattttttgcattttcaaaaaataatagaatagaaaatctatctatttatagggaactgcatgactgtgtgacacatctccctgttgtgaaatccaagctactgtcataaaacatttagaaacaaaaagggaagagaggagtaagatggtccaaagaggaagctcttgctatgtatttgcatttctatggaaacagtcttgggcagacatggctttggtcctctgtggtcagaggaacatgaagtcaggtgcctggcagctggtcagaggctgctgcagcagcaatttgcaggggacagaatggcataagagaacagacacccagaggcctccaaatctcctaataacagggaccaggaacttgtgggtttatctctctaaatgcccagctagtcctgtggcaatctccctccatgtgcacttgcaagtgggcatccttgccattttctccctccccctaaaagcactgtgcaaaaaaacatgagatgtagacaacagagagagaagacagatggactgctataagaccagtgactagacgataaggagaataacattttatgtttattattaacaaatagaacaggtacagttgccgccagtaattaaaagatggttatgcattagcagtctcaattattcaacttagtagggaaaaaaaaagaaaaagaaaaagaccaaaaaaaaaagacgactattttggaaactgatgaaaaaaacagataacaagagtcaacatacattcctcattaggaaaacaaaaagataaacaacccttgttaaagtaaaaataggaaaaaatgttgactatgataatgctaccagagtttgacaacaaaattgtaccttattaaaatataataaaatcattcccaatgaggcaaaacagtagaaaaagtagactgacatcattatagtttattattgttctacaagttctagtatccacaataagataaggaaaaaaaagatgtttaacttttaataaagcaaagctaaaattgtccctccttgcagatgaatttatctgtatggagaaatcaaaaagacttaactaaaaaaattaatgggattttaagaaaagtagaaagatatatgtttaatatacacatatgttgaatgcctgctgcatgcctttgaaccatggcatatcattttaattctcattcacactggcaagataggtctaaccttctgatcctacagatgacacaattcaaatctggagaaatttagtaccttactcagagacggtttctaactgctagaacatgaacccagtaatgactttcttacagctcacattcttcatatactagcccagcgtgattattactattaatatgttactatatgaacaacattaataatagcttaaaaggcactctttaataagtacgtcttatatgcatgcattgcactatgaatgaatgaataacctctttcctcccaaacaacagcaaatgttcctcaaagtttccacggccaaaatatacttcttcaataaataaaattttaaaaccatcaaattaattgctttctctaaatattattaatcatatgtaatctatgagcagagaggcatatcatttggaacaagaagtgatacaaaaaatgaagaaactaaaatgtatagggagagtgacatcagcaagatgacagaataggactttccagcactcatcccctaggaggaacatcaatttggacaatttatccttgcacaaaaataatttcataagagctaaggaaacccaggtgagagattacagcaacttggagtagcaaagaaataagaactgacacattgaagaggctaggaaggacagcttcacattatctgagtcacccctcccttaagcctgggcagcacaacatggagagataacctccacatgtgggagggaaagtgaaataagcacctggctttgctacaaaccccagcaccaggccagcttcaatgaaattcagcactaggccagcctccacagccccagactctaggtcagcacccatggatcatgcctccaggcctaccctactgtcagaccagacccattgctccaggctccaggccattctctacagccccataatgacacccaaggacccaccttctaggacctcctcagtgccagaacaacacctgcagatctcagttctaggctggcccatgaagcctcagacgtctggctggttccagcagccccaggctctaggccagctgccataaccccaggctccaggtcagcccctgtagccccagactccaggctggccccagtggccccaggcactagaccagcaactgtagacccagaaactaggttcactcctgcagactcactttctaggcccaccccagtaccaagccagccctgcaaagactcaagttccaggactatctccacgaacccaggtggcaagtctattccaacaaaaggccatcccctgatgactcaggctcaaggcccatctcagcaccaggctggctcttatggacccaggatccaggcccgatccccatacactcagctttaagcaggtccctgtggacccaggtaccagacctgcacacattctgacccagacaccaggccagcctgccctaggactctagcagcaaacccaccactgggacttacaaaatggtcaactcagaatctcagaactcaacccagactggagagttttccctgccaaagccaatctgtaaaaactggaataggtgcctacttctttgaacttgcaatcataagacatggccagaagggtaaaaaaattatctgtgaaacatgacaccaccaaatgaacaagataaagcactagtaactaaccctaaagaaagggagatatgactgcctgacacagaattcaaaataactgtcttgaagtccagtgagctacaagaaaacacagacaactaaacataatcataaaaacactacctgaacaaaatttgaagttcaacaaatagaaaccataaaagtgaaccaaacaaaaattatggtgctgaagcatacaataccttaacaggaaaattccacagacagcttcaacagcaaactccatcaagcagcaggaaaaaaatcagtgagataaaaacaggtcatttaaaattacctagtcagataaacaaaaagaaataaaaatgaaaaagaataaagaaagcctacaaaattatgaaacaccatcaagtgaaccaacatatactttacagaattctcacaaagagcacagaaagagaaaggagaagaaagcttatttattaaaaaaaaaaagatagaaaaattcccaatctgaagagggaaataaatatctagaatcttgaagcccaaagaacccaaaataaatcaaatataaagagatcttcactgaaacctaatcaaattctcagaagtcaaagacaaagagaaaaattgagaagcaacaaaagaaagaaaaattgtcacatacaagggaatcttattaaaaccaccagcagatttctcagcagaaaccttgcaggccaggagagagtgggatgatatatacaaagtactgaaagaaaacaactgtcaaccaagaatactatactcagcaagtcttcagaaatgaagagagataaggaggtttccagacaagcaaaagttgtaggagttcatcattagtagagctgccttacaagaaatgctaaagtaagctcttcaaattgaaacaaaagggtggtaactagaaacatgaaatcatttgaaattgtaaaactcaccataaaaataagaatgcagtggagtttagaatactctaatactgtaagggtgatgcataaatcactttttaagtctaatataaaagctaaaagattaaagtattaaaaattgtggtcattaaataatttggtaatggatacacaatatataaaagaggtacattgtgatatcagtaacacaaaatgtggggagatgaataaagcatagagttttgtatgcagtcaaagtaaagatgttatcagcttaaaatagattgttataactacatgatgttttatgtaagctttgtgttaaccataaaaaaacctatagtagatacacaaaagataaagagaaagcaatcaaaggataccacaaaaaaaaatctatcaactctaaaaggagggcagcaagagaggaggcatgaaacaaaagaactacaaaatagtcagaaaacaattttttaaataaccacagtaagtccttacctatcagtaattactttaaatgtaaatggattaaattctcaaatcaaaaaatgtaatgtctaaatagatttttaaaagcaaaatttaactacattcttcctataagatactcactttagcattaagaaaacatatagtctgaatgtaaagagatggagataaaatattccactcaaacaatcacctaaagagagcagaggtgtctatattaatatcagacaaaatagattttagtcaaaagctgtcacaagagacaaagaagatcgttgataaaagggttaaattatcaaaaggacataacaattgtaagtatatatatacacatatctacatatatatacatacatatatacatatatgtgtgtgcgtgtatgtatatatatacatacccaacatcagttttctctgtctgaaatgctctaagctgacttgaacagacatttctcaaaagaagacagacaaatgattggcaggtatatgaaaaaatattcaacatcattaatcattagagaaatgcaaattaaaatcacagtgaaatatcacctcaaactcatttgataatggctattatcaaagagacaaaagataacaaatggtgacaagaatgtggagaaaaaggaaccctttatactcagtgacaatgtaagttagtataaccattatggaaaatagtataaaggtttctcaaaaaaaaaaaaattatcatatgacccagaaatcccacttctggatataaatgaaaaggaaataaaatcagcatgttgaggagatatctgtactcccatattcattccatatctttgctattactcaaaacaacccgctgattttacagccctatggccttgagtgaacataggcagtaaccaggtcgtggttacagtggactttgggtgagacctggtgctgtgttggcttcaagtctgacctaacacagcccccgttgtggtggctacaggggcatgggtattactggctattattgggtattattcatagcagccaagacatggaatcaatgttaagtgtccattgatggatgaatgggtaaagaagatgtaatacacacacacacacacacacacacacacacacacacaatgagataccattcagcctttaaaaagaaagaaattttgtcatttcagacaacagaggaaacatggataagcctgaaggacattagattatgctaagtgagataagccaggaacaaaagaggcaaatacatgggccttaagtgagactctgagatgctttggggggaacatagcccatccctagctgttgtggctatggggaaagactccatctgcttgagaaaagtaaaggggcatttatcttgcactttaggtaccagctcagtcacagtggagcagagcaacaggcagcctcttggggtctccagttctaggcattgactcttggatggtatttctagacctgctctgggccagaggggagcccaccaccctgaacggtgagtcgcaggcctggcaacattcaccacaagctgactgaaaagaccttggcccttaaggaagcatcagtggaagcctgccagtaatcctcatggacctgtggtgctggtggccatgaggtgaggcttctctgtctatagaaaggggaggaaacaatgggaacgactgcatcttgtgttttaagtaccagcttagcagcagtgcaagagaaaccaggtagatgtctaggattttttctgtagtctctagccttttctctagtcctggatggcatctatggaccaattcaggggctagcggaactcactgccatgaagggaaggatacaagcctgtccgtcttcaccacctgctgattgtacagccctcgggccttgagtgaacataggcagtagccaggtagtggttacaatggaccttgggtgagatctggtgctgtgctggcttcaagtctgacctagcccagccccagtggtggtggccacagggatatgtgtgtcagccccttccagttccaggtggctcagcacagagagaaagagacactgtttgtacaggagaaggtaagggaagagaagactttctacctgataatccagagaattcttttggatcttattcaagataatcaaggcagtacccctatgagtctgcaaacaccacagtgttactgggctttggggtgccccctaatgcagatacagcttagatcataacactcaagtctttccaaatatctagaaagcttccccaagaaggacagctacaaataagcccagatagtgaagactacaataaatacctaactcttcaatgcccagacactgataaacatctacaagcattagcatcatccaggaaaacatgacttcaccaaacaaaccaaataagacaacagggagcagtcctggagaaacagagatatgtgacttttcaggcagagaattcaaaatagccattttaaggaaactccaagaaattcaggataacacagagaaggaattcagaattctatcagatacatttaacaagcagattgaaataattaaaaagaatcaagatgaaattctggagttgaaaattgcaactgacatactgaagaacacatcagagtcttttaatagcagaattgataaagcagaagaaacaattagtgagcttgaagacaggctatttgaaaaggcacagtcagaagagacaaaaaggaataaaaaagaatgaagcaagcctacaatatttagaaaatagccccaaaagggcaaatttaagagttattggcctttaaaaggaggtagagaaagagataagggtagaaagtttattcaaagggataataacgagaatttctccaatctagagaaaggtatcaatatccaagtaaaagaaggttatagaacaccaagcagatttaactcaaagatgactaccacctgccatttaataatcaaattcccaaaggttaaggataaggaaaggaccctaaaagcagcaagagaaaagaaacaaatgacataacaatgaagctccagtacaaccaaccaatttgtttcaaccagtgaaacaaatgacataacaactaagctccagcaaaaaccttatgaaacagcagaaagtggcatgacatatttaaagtgctgaaggaaaaaatgtttaccctagaatagtatatctggtgaaaacatccttcaaacatgaaggagaaataaaagctttctcagaaaaacaaaagctgaagaacttaaccaacaccagaccggtcctacacgaaatgctaaagggagtactgcaatccagaagaaaagcacattaatgagcaataagaatttttctgggctgggcgctgtggcttacagctgtaatctcagcactttgggaggccaaggcaggtggattacaaggtcagcagatcgagaccatgctggctaacacagtgaaaccccatctctactaaaaatacaaaaaattaactgggtgtggtggtggacgcctgtagtcccagctacttgggaggctgaggcaggagaatggcatgaacccaggaggcagagcttgcagtgagccaagatcatgctactgcacttcagcctgagcgacaaagcgagactccatctcaaaaaaaaaaaaaaaagaatttttctgaaggtacaaaattcactggtaatgttaagtacatagaaaaaacacagaatattataacactgtaattgtggtgtttaaactcatcttaagtagaaacactaaaagatgaataaatcaaaaataataactataatacaacaacttttcaagacataagcagtacaataagatacaaatagaacaaaaagtttaaaagtgggggaacaaagttaaggtgtatagtttttattagtttccttttggcttatttgtttatgcaaacagtataacgtttttatcaggttaaaaaaatgggttataagatagtgtttgcaagcctcatggcaacttcaaataaaaaaaatacaacagatacagaaaaaataaaaagcaagaaattaaatctaactaccagagaaagtcaccttcactcaaaggaagagaaaagaaagaaaaaaaaggaaagaaaagagaaaagaaagaaagaaagagagaaagaaaataaaggaaaggaaaagaaagagagagaagagaaagaaagaaagaaaggccacaaaataaccagaaaacaaataacaaaataacaaaatgtcaggagtaagtatttacttatcaataataacattgaatataaatggactaaactctccaatcaaaagacatagagttgctgaatggataagaaacaagacctagtgatctgttgcctacaaaagcacacttaacctataaagacacacatagactgaaataaagggatagaaaaggatattccatgctaatggaaaccaaaaaagagcagaagtagttacacttatatcagacaaaatagatttcaagacaaaaactataagaagagacaaataaggtcactatataatgataaaggggtcaattcagcaagatgataaaccaattgtaaatacatatgcacccaacaccagagcacccagatatatagagcaaatattattggagctaaagagagagatagactccagtacaacaatagctggagacttcaaaaccccactttcagtattggacagatcttccagacagaaaatcaacaaagaaacatcaaacttaatctgcactatagaccaaatggacctaatacatatttacagaacactttattcaactactgcagaatacacattctttccctcagcacatggatcattctcaaggatagaatataggttgggtcacaaaacaagtcttaacacattcaaaaaaattgagataatatagagcattttctctgataacaatggaatagaactaaaaatcaacaagaggaattttggaaatgatacaaatacatgaaaattaaacaatatgatcctgaatgaccagtggcttaataaagaatttaagaacaaaattgaaaaatttcttgaaacaaatgatactggaaacaacatatcaaaacctgtgggatgcagaaaaaatagtactatgagggaaatttatagctataagtgcctacatcaaaaaagaagaaaaacttcaaataaaccacctaaggctgcgtcttatggaaccagaaaagcaagagcaaaccaaacccaaaattagtagaagaaaataaataataaagatcaaagcagaaataaataaaattgaaatgagaaagaaatacaaaagatcaacaatacaaaaagttggttatttgaaaagttaaacaaaaatgacaagcctttagccagattaacaagaaaaaaagagtgtagacccaaataaataaaattagacacaagaaaggacacaatattcaactgataacacagaaattcaaaggatcattagtggctactatgggcaactatatgccaataaacttgaaaatctagaagaaattgacaaatttctagacacatacaacctaccaagattgaaccatgaagaaatcaaaaaccagaacagaccaataacaagtaatgaaactgaagtaataataaaaacatcttccagcaaggaaaagcctgtgactcaacagtttcacagctgaatcccaccaaacatttaaagaggaaataataccaattctacccaaactattctgaaaactagaagaaaatagaatacttccaaactcattctgtgggactagtattaccctgagaccaaaacaagacaaaggcacaccaaataggaaaactataggcccatatcactaataaatgttgatgcaaaaatcctcaacaaaatactagcaaactgaattcaacaacaccttaaaaagataatccatcataatcaagtgggatttatccctggaatgcaagcatagttcaacatagacacaaatcaatcaatgtgatacatcataacaacagaatgagggacagaagccatataattatttaaattgatgctggaaaagcatttgataaaattcaacagcccttcatgacaaaaaccctcaaaaaaaactgggtatagaaggactatacctcaacataataaaagccatatatgacagaccttcagctagtattacactgcatagggaaaaactgaaagcctttcttcttcaaagatttggaacacagcaaagatgctcattttcttcactgttattcaacatagtattggaagtcctagctagaggaatcagacaagacaaagaaacaaagggcatctaaattggaaagaagtcaaattatccttgtttacagatcaagtgatcttatatttggaaaaacctgaagactccaccgaaataattagaaatgataaacaaattcagtaaagttgcaggatacacaatcaacagacaaaactcagtagcattttatatgccaagagtgaacaattggaaaaagaattcaagcaagtaatcccatttacaatagccataaataaattaaatacctaagaatttgcttaaccaaagatgtgaaagatatctacagtgaaaactataaagcactgatgcaagaaattggagaggacactaaaaaatggaaagatagtccatgttcctggattagaagaatcaatattgttaaaatgtctatacttctcaaagcaatctacagatttaatgcaatccctatcaaaatatcaatgatcttcttcacagaaatagaaaaaaaagtttaatttatatgaaaccacagaagacccagaataaccaaagctatcctaagcaaaaagagcaaaactgaagtaataacattaataacattatctgacttcaaattatgttgcagagctatagtatccaaattggcacggtagtagtataaaaacaggcacataggccagtttaacagaatagagaacccagaaataaatccatacatctacagtgagcacattttcaacaaaatttttgagagcacacattggggaaaggacagtctcttcaataaatgttgctgggaaaactggatatccatatgcagaagaatgaaactagactcctatctctcaccatataaaaaataaaaatggattcaagacttaaattcaaggcctcaacatataaaactactaaaagaaagcattggggaaactccaggtattggagtgggcaaagaagacttcttgaataataacccacaggcacacgcaaccaaagcaaaaatggacaaatgggatcacatcaagttaaaaagtttctgcccagcaaaggatgcaatcaacaaagtgaagagatgacccacagaatgggagaaaatatttgcaaactacccatatgacaagggattaataactagaatatataaggagctcaaacaactctagaaaaaaaattaatcatgtaattaaaaaatggacaaaagatttgaatagatatttctcaaaagaagacatacaaatggcaaacaggtatatgaaaaggcactcaacatcattaatcatcagaggaaaaaaatcaaaactacagtgagatatcatctcactccaattaaaatggcttttatccagaggacaagcaataacaaatgctggcaaggatgtggagaaaagggaaccctactgctggtgggaatgtaaattagtacaaccactatggagaacagtttggagtgtcctcaaaaaactaaaatagagctatcatattatccagcaatcccactgctgggtatatacccaaaagaaaagaaatcagtatatctaagagatatctgcactcccatatttgttgcaacattagtcacaataagtcataatttggaaacaacctaattgtctatcaacagataaatgaataaagaaaatgtggtatatatacacaatggagtagtatttgaccacaaaaaaatgagatcctgacatttgcaacaacatgaatggaacaactttcatcatattaagtgaaaaagccaaacacagaaagacaaacattgtatgttctcagttatctttgggagctaaaaattaaacaattgaactcaaagagatagagggtagcaggatggttatcagcaactggaaagcgcagtgggcttgaggagtaattggggatggttaatgggtacaaaaaataaaaagaactaataagacctagtatttgctagcacaacgatataaaaataatttaattgtacatttaaaaataactaaatgagtataactgtactgtttgaatcacaaaggatgcatacttgagatgatgagtaccccatttaccctgatgtgattattatatgttgcatgcctgtgtgaaaatatttcatgtaccccataaatatatacacctactatatactcacaaagaattaaaaataaaaaaagttgaaaaaggcaaatacattattatctcacttatacatgaattctaaaaaagtcacactcatagaagcagagacagtagtatagtggtttcagaggctggtaacaggtcaaagggagcagaaatgggaagacgtttgttaaagggtataaagttttgtgaggataaatacattctggagatctattgtacaacatggtggttttagttgataataatctattatatacttgaaaattgctaagagagtaaattttaaatgttcacaccacaaaaaataagtatgtgagatgatggatatgttaattaactttaaccatttaacaatgtatatatacatctatcaaaacatcacatcatacactgtaaatatacacaatttttatttgtcaataatgcctgaataaactgagaacaaaataaaaatgaaaatatgttaccctaaataatttaatctaatttaatttgtagatgctttacctgatatccctaataaattttcaagccacatattatttttattgttaaaataaaggaggttgagaaggataggaagctttgtccaaaatcccatagttggaggcaagatacaaacccagatctatctgtcacctcctgctttccttccggatttagacttcagttttctagtcaattatctcaaacttatctcacagggacatactccagcagactccaggaacccattcattcctagagtaaaattgagtgtttggcctggagaaaatgggagatcctttctccacacaaaaacatagctacccaaaaccatatcatcagggccaagtgccttttatggagcatttaccattcaggcactttaccagacaacctcaatttatactcacacagcagcccagataaggagatactgtcactatcccccttttgccattgagaaagctaaaactaagagaggagaagtgatttgcccaaggtcaaacacttagtaaataggagaaacaagattctcatctagagctatctgaagtcaaaccaattcatccagatattccattgtaatcttaaatgctagggcaaatgtgctcacaatgaacttccaccctgcctctaatccctgcatcatgcaaattcttaagatttacctccaagaagctctggttcacagggctgggaaagccccaagagcttaacaaatataccctgtgactgttagattcattaactgtgagacccctaggacttgagagttccactggttgggctgggatttagttacaaagaccccatcaccggacaaaaagcaagttaagtccactttccttttctctggaaataacagacttttgggttccctgtccatatatggccagatcatgtagtctggggacaacatacagtagaatggagtatctactgtgcactgactctatcttggaagatggtctgtctcaagaaccagagacatgagcttgtgcctgtgcaaggaagtgtctggtcacttttcctactcagctatgacagccagtgagataggttaataaataggcagctccaaagaagttaggataagaagaggaaggaaatagttttccctagagctggagtgagctaccagcctgtatcaaatgtgccctatttatttggcaagttctgctgataaacaaccttgtccgctctctcctgctgaggaattcctgatatgaactgtcaaacatccacatccttcctgtaatccacctcctgtgtgaagcagagatttcttctggaagtaaagccaaccttgccatctcggctgccaggttggcattagaatagtggaatcttgtaagctgcaaccccccctgccccgcaaccagagagatgccaccatgttgtgctgggtctgctgtttccagcaaaataagcacatgtgtggttcactgccttccctggaatgtccgggagcaggaagaaggggtcctcctgccagactccctagtttcactctcttcgcttctctggaaaattttatctcatggaatcttgtaccttgctttcagaatgaccaggaatattctatggaagcagaatgttaaggaagatataacgcatgttggtgcagagaacaccagtctctgaatgctggacctttaaaaccttgtgagtacacagcatatctgtagaaaagtctacagtggcaaacacttcttgttgaactcttgtatttctagttagtgatgattcccaactctgcctaattgatctgtctagagaggatggcagggcttcaaatctaaaagcccagttaaaaagccctgagataaaacctccccccaaaaattacatgccagatacctatatactgattttttttatgaaaagctgatacccacagccctctataacagtactgtcttcccaaatataccttgctctcagagaatcagggttgataatatatgtcagggtgggtggagaacagatagagcctgtttgtacagtgacagtgtggctcattcatttattcatgcagttactcaaacagcaaatatttattaaacaccacatgtgagcaagaacatctattcagcacaatgagggtgataataggggatgcagaattgttgttgggtcacagaggcaggcatctaatctagcctagctgtggggaaacaaggatgccttccccgagagggtaacacctaagctgagatgtggaagatgagtaaaaacatgtgcaaaggcgtagggactgaatctgaggaacgtgaagaaattcagggtgactacaaggtagcagttgctacattaagaaaagtctcattaactaagcaaagcacgtactacatcagattgagccctatggggtgtcattgagatatttttagaagggaatggcatgggaaaaaaatggagatttacaaaggctcacctggctgcagtgtaaagaagtgatggacagggtgatccaggtgtcaggggagcctgttgagaaggctttgcagtgacctcagacaaagataatgaaaggcacatctatgtgttgtcagtggaatagagagaactggatggattgtgacttatttaggagataccatttaaaataaaacttgtacatataaattatttcaattttagatggtgtggtacactgagtagtggcctcccaaagatgtccacatcctaattcctggcatctgtgaatatgttgttttatatgatggaagagatcatgaagatgtagttcaattaagaaccttgagatggggaaattatcctggattatccagtttggcccaatctaatcacaagtgtcctaataagggaaagaggaaggcaagagagactggatcaagtggagatcaatttgaagatgctttgctgctggctttgaagatgaaggaggaggccaggagtcaaggaaagcaggtggcttctggaagtcagaaaatgcaatgaaacgttctcccctacagcctcagagagagcccagccctgccaattcatttcagacctgtgacctctagaactggaagataatgaatttttgttgttttaagccactaagtgtgtggcaatttgttatgttaacaggaaaccaatacagataggaaaactaagtcctggcccctgatagacatgtaataagtatgtgtttagttaatgcacgaatgaggcttagagaggtacagtggacgttctaaagtaacaaggcttccaagttctcaaacttacatggaaagttgaaaaatcccccttacctgataatagtggttaactcaagatgtgggacttggggacaggaggagaagggagacttacttttcactacagcttattatactacctgaatttgtcaccctgtgcacatattgcctatttaagaaaagttaatgacccttgtcttcaagtctgagggataagacaggtgtatagatcaaaatagaaaagaaagtaatcagtaacccaatgccacatctgaaggtaggtactgtgacaattcaatatttttggatatgctcagttaattaaatctgaattccagtgcctatctgctcaagctaccatccacccactctctttcttttcctcttcaaaggtttcaactctaaaaatagtgtacatctatactgccctgtcccttcttagccccatgaaattttgcatgtactctgcccccagtaaaatgctaagctgctcatcctcatagggaaatgatatcaactcatgggcagggcatgacttttgtagacaagagctagatttgaaacctagtatccacatcagagtaaccaagaaaaatttatttaaaccttctgagcctcagtttttctatctgtgaaatggcatcatgatgtgttataaggatttgttggtttatttatttgtttttgaacagaattcagtcaagcaatgtatgtaaagcatttggcatggtatgtggcacccaatacatattagttcaatttccctctttatgtattttcttcccttttccgcagtagccaaagcttttatcttagcccttagcttctccaaactttctgcagtataggacaaaattgatctctctttcacccctctcactttcctctcccactttgtttttttcatcctgtaatttgtgcaatagaaattttacaaggaatacaaaaagtgcagacatcattccagcattgtgaaatgaagatggcttaatcagacagttgtgctcatgtgggatcccctgggccatttataggcaccatttaagttcagaactccacacacgctcagtatgtttcaggtgatatatatggttgttacatgtaaacctatgttaggcagttcctgccacaaagatgctatgtaacacaccagccccaaactcactgccttccaactccactttcattctcatgtacacaaatttataggctgactgtgttcatctgatctagaattggttccctggggtggctctgcttgaagctgcaggacaaaggggtgtggatccagcctcatcctgagaccaggctgaaagggcagcagccactgagggtatgttcttttcaggtgatggcagaaatgcagagggaaagcccaaccacacaaacacagtgcccagtaatggcccaataaagtcacaaggccaatgtcaagaggtgagacggtacattctgcccactgtaaggccgtagcaagggagtggctagacactaatactagggagagtgaagcattgggaacaattatctaacctactacactatcaatccacctgaagtgattagcaagtaatcccccattcttccccagctccccttccacaaatcctcaccaggaattcacataagccatgaagactatgactaatgttggtagttgggtttctaaatcaatagtcaagaaaaaaagcttcattaaacgtgtcattaaccccctgaaattgtaagtattcataagcacgtgggtacataccttttctattgagagagtacaaaactttagattctcaataagaatttcagaactacttctctcactagcctcatattcacagccaggagcggttctttagcacagcagcaagacacagctatagtattaagttctgaacctgggatagtcaatggcctgatccagtttgtgccacaatcatcctccccaagaacttcactcagagcatctcagcctaaacatcacctcgccacaccagcctcccctgatcacttgagttgatacagctcttctcatccccagttacttccctatcccatcgcccatgttatttcctaggtcttattgaatttatgtgttagttattattttctgtcccctcccactagaatgcaagctccatgtccttatccgtcttgtccccaatcttaacatagcgtctaacacatagtggaagccccatacgtatgttaaatttatgaaatgaatgaatggatgaatgaatatgagcatcattgggagatgctagataaagctaacaacctagcatggaattcatgggtctctagagaatacgctccccaaggtgtttgtgggaagttttgtaaaagagtgtgttaaaatgtacacacatggtggatgggctgggagagaactatgggagaaaattaacaatctgtgctttgttcttcacttgagttatgcgtgattagcttccaatgaaaaagacatttcttcacacacacacacgaattcatgtgtacacacacacacacacacacacacacacagacacaccccccagagtctcttatatgtgagtctatctcctagacttgtggttctcagccagaggcaattttgtcccccaggagacattggcaaagtctggaaacattttaaattgtcacaacttggggtgggagagctactggcatccgataggtagaggccaggaatgttgctaaatatcttgaaacacatcccactttatcacccactacaaagagttttccagcccaatatgtcaatagtaccaagattgaaaactcttgttctagaaccagaaatttacacatgtttacacacacatccatggcatggtaggatccaaagaccatcttggctagccaactctctaatctctgatcatggtgtccagataacaggacttaatctcattttgaaatctctgtctttttaaagttttgacaaatatttaccagaaaacctcttatgaagccaacactttcatatctattctctcatttagggagtattgcaaaatcccgttttactaatgtggaagctaagactcagggaagttaagtcatttgtcaaagttacgcagctagaaattgcagagtcagggttcaagcacctatttcactgaattgtgctcagatgtctttcttccggccaccagcacttcacttcatgttctttatgaatagttttgttttacattaattttctctgtctggagagccccaagctgacttgctgcatatcagtgctccaaagagccctcttgtttagtcaacttccctatgaaaagatacagtgagcaccacctaagaagcatagatacttgctgctgctgctgctgctgcagaagcttctatctctcagttcatctttattacttctttgtatttgcacttgtacactgctgcagaagcttctatctctcagttcatctttattccttctttttatttgtacttgcgcaatttgggcagttccaggccttttctctcaaccccaatgtctgccagtctggaaagtgtcatctgaagccctcctagattcaggagaagtttcctgggttgtcgtccatagaagaatccctcacacaaggtcaccaacaacccagcaccttcccaggggtgttctcttggttctacagcaagacagctccactgtagctatagtgacatccaaagattaatgccattaatgctcccagtgccactgtgtaaatttttaactctttcctgcctgcatgttcaagttacacagccaatacacagcacatgataagtgcacagttaatctttcagattaatcttgacaataagcaaacaaacaataaatgaataatatgtacatacataaaaataacccaaaagtgttgttattcttgtggtacttgtgttttaatgaagaactttttatttagtttatctattcgttcaacaaatagttactgagcttctttgaagctctaaaccctgtgctagatgctaaagaaaaaagtataaacaaagataggcaagaccctgtcctcagagagcttacattccagtggcaggtctggactttggtcatggcctttttaatgcataattatgaaacagaataagtgatctgaggaaacactgtgggggctctgagaatgcttatcaggagaatttcactggatctggccagggctgggcagagaaatctttcctaaggaaagatcctgaagggccctaaccttaaaggaagattctccaatgtgagagtgttcatcacctgcagcaattgataagcatggcattgggagtaggatatgccaccctcctggggtgtcacacattccacatgtgctaggtgacaccctttgccaagaagcagagctgggctgaacattcagtttcctaggagcagtagctgagtgcagtaatctttagactttccatttgcttatcccccaaaataacttctgaaagtttggtgcctcctagcaaaggatatcatttttaagatggcaaatattgaaattgttaaacaaaactgtcaaacactttttaaaatgtaatcaatagtaagcatagtaatttcatacccaccatcatccatttaaaaaatgaacacgctctcctgtaacagtcagatattttacatccctcacagacttttaagctcatgcaatatattttgatgcttgaaaatctttaattgttcatttttatggctgcatagtatttcatggtgcatatgtaccacaatttctttatccagtcagtcactgatgggaattgaggttgattccatgtctttgctattgtgaatcgtgctgcaatgagcatacgtatgcatgtgaagaggatcaggaaaaataactaatgggtatagacttaatacctaggtggtaaaataatctgtacaacaaatccttatgacacaagtttacctatataacaaacctgcacatgtactcttgaacttaaaattaaaatttaaaaaatctttaattgatcatacctatctgctacaacaatatgtaaataaattgacttttaaattttgtttgtaatacctaggactatgtggttcaagtattaaaaagaatttcctctatatgaatacaccattattattactaagacatgaattaaagcaagatatatacattataaattttgataaatatttattaagcagaaagaaatcaattgtattggaaattcctctattaatggggatgattatgacaaattacatgaaagaaagagtgttcagtatcgattctatttcttttttgtgtttatacacattaaatgcccagaaaatgtgttcacaaaatagctacatagaaatggaagcttcttttttaaacattgttattcaaatcattattgcaactgactatggaacaaaaacatcaaaaatattttttaatgttttgaattatccttttggtgtcctagaagttttttgtgatagtccaatgcagagtaatgagactctcaataagcaaagatatggtcttttgtgtttcttatgggaaatgggagattattaaataatgaggagaaattttagtgttcttaatcagttggccaagtttaaggaaagtttatatggaagttgataatccaaaaccaaatttcttcatatgtctctccgaaaatacttataaatcttcagggtatatataccccagtttgaagaccactggctttgagaatcctatcagtctttaatcacctctaaagactgacaatattcttggtttttgttcaacatgttgaccctccccaatgtgggcgagaggccatctcagtggatgttatgaacagcctcatcctccttcaaagtgaagggccccctactggatttttcacactatatgccagtgcagggtggattctcctgttgagaattaaacaccaggaagagaacagagaggatggaatgagaatgggtaggacaacttggtctgggaggtcaagaaacacttaactggaacagtgacatctgactgaggtacaaaagattaatagaagtcaactggaccaggagggaaagtaggagagggagaacatttcaggcagagagcatggcacatgggaaaggactgaagaagagaagagcatgagggttcttatatgctcagaggaagagagtacaacttattcttcatgcaatgggaagccgttgaattgttttaaaggaggaactaacatggtcggatctatacttctctacagtcactctggaaactgatgattaccaagcccctgaagcataagtccagaagaggaatgaacaagctagcctagagcaaaataggactgccaccgcctccatactagacagcagaatgcaacctatgatcattacttggctctttgcagccccttcgcagtgtaccccagacactgatgtctccttccatctccatgctgttgagtcacttctctcaaaccctgacagtgaacatttggcttgctagtcccagaataagactgcacagctcttcattctctctctttccaaaccaaattactgatctgttcctttgttaaattgctttggtgcctgatgatctatacatttaggtgtaatcttctcccccagcaacttctccagatctttttatttcctaaacagaatgctggtgcaagctgttaataaatattttcacaccattacacatgatatgatcttatgagttgatatggcacctatggtatatcttatagtataacataacacaacataatatatttgagagttagtcataataagtttattatgaatgatttatagccccaagtaaatatgtacatgattaataataattgttattatgaaatgcatatttgattacccaaagcctttttagatagtgcaaagttccaggttaaactgtttccttgctttataaaataagatgagaaaaataccaaattcataactatgaataaatattaagtgacaaaataatatattgtaggtaagtctgagatgccctgggttgtggtacgtggagagatgtaattctttttttgcctacaaaactttttagattccttattgtgtcaagcaagtctttttataaatttccatgatatgatatacaaggtttcccaaacacatttgaccacagagcacttgtacagagagcaccatgctgactggcattctgcagaacatgctgcagaaaacacagtagctggagaatgtctcaagctttcttcatttcttagtgccctgggattcttagatcctacttaaacctgttaccaaatcctatttcttggcaagaacattcctcatcccctcttctaccctcaagtcatcttctcttgccaccttcagtgcaaaataatttttttccaagtttcagtttggataatttgatctccttatggtcaagaatcatgtcttactcaactttgtatattatagttgccagtttatggtaagcacttagtaaatagttgttaaggaatgaatagtaaccagcatacagcatactttataaactgtgactcttttcacccttctcctaaaacagaatataagagattacataagtatgtatagtgtatttcagggactcattgtatggaacttactgcaaatattcactggtgcttgtggtcttcatggaccgtgaagccagtctttgcattttgtgaaccttagttgcgtggagcaatattataatacttccaccactctctggtttcttagaagttacactgctcttcaactgttttaccctcagtccaagttctaggtaaatgattcaggataatccttctctttttttgttttcagaagttcataaccaattagatgaggagattgagagttgaactggggaagtaaaaatgtaacttgaacatctgaagaaaaccactttagtttctaaatgcattgactttccttgagttacagtaaaaagtcagacaagccacatctcagaaagtgctgtgtgcacacatttgtacattagagccctccaccccaagaaagccatgcaaagcatgcaatacatttcccagaaaaggcagcatcatgaaacagatcctcctgggccactgctatgtgcttccttccagctctgtagctgggtgttggactttctcattttctgttctgctcagaaaggcgttttgttcttgaacaaaaaatacctgggcagggaatctctgtcataactgcttaatgcctggtcttgggggaagagatggagatcactgtcacttccccagtgtggtatccaggaaggacagcagctctggaaagccaagccatgccttcaaaggacctgtactcatctttggccatctttggccaattgtctgtagtcatactcacaggagattgtaagaggaaaaaaatacaaatacttccatgaggatatcaaggcttcttactgccgaaaggaggctgttgagaattgaaacttctcttcagatccactgaacctaggcttctttcccctctagctctatctgagaagcaatatgagaagcaatatacaggagcacatattttggtgaagcaagtcttccttctagtacagattccacccttttataggactggaatgcttcagatgcagtgaccagccctaagtttacaaaaatcacgctgctcttgcacagcttccagtctagtgagagagaaagggatgtgggagaatgtttatgatatattgtaatacggacatttccaagagagacattaatttgggttaacctcatctgtggtactcaggagagctagtcagagacaggaatgctttaagtagatgttaaagtaagagcaggtgttaacactaaggtgggctatattattctataggaatacaaattatctaaatctaaacggagaaacacaatcgaagtttatttccagcttatgcaaagtctaattcagatgttcatagtgagacagctctactgagtagctcttgttcacacagtgatttggtatcctcatccacatcaatttaggggttctgctattccttaggacctcagaattcttcttctggatcttcaacagattgtcttcatcttcacaatgaggaatgacacagaatatagatctctcaagagattttaagagtcaaccaagaattaccttacatcactgctatccacatcacagtagccagaaatagccatgtggctccactaaatggcaaaaggaagctaggaaaggtaatttttctgtattctcaaaggagtagggaagtgtgtttgattatagtattggttatgccacaataggatttgccaaggagcaagagaaaggtatttcatgggaaaggaatggggatctggctttgaaagtacatggtggcctgttcctcaatgggagcaccaggaagaacagagcctttcaagaaaaatatatttggaaatcagacaggaaaactcatggcagactaagatatttgtggaagagggttgcaaagagtaaagttggaaagttggtcttggggtcagctggggtataagctggactattccagtgagactagttctttcctaaatagtacacacttggtctccattccctgtaaaagggacaagtccccagagaagtttctacaaaggatgatttgacctatttaaaaacatgagctggtctttccattttttatttttatgtccagagagaccccgatgtcagagacctaaagatctgcgagtgaatccagggtttactcttcaatgcaggagctttcaccaccagccttagcctcatgcaaactgctcccttagtgtgcacctggaaggcttgaaatacacagtccgtgagtcaagagcataggtaatttccaagcaaatcctaaatgttgggttcagagaagggagcttttgagacctatagaggcatggtctaaaatgtagattggaggccttcacagagaactctttagaagaagatgcaggccatcacaattagacttgatgtctacaccctgtcttctcactcacctttgtaggctgagagatcaaatgtgttgactgattctaacttccatcctgtcatggtttatttttttaagtttaaataattatttactttaatttcttttgataatataaacatattacaaaaattatgtaatatggaaaagtagaaaaaaaacccaaaatcttactactcaaaaattgagcattgagcaaacatttttctagaacattctctatatttaagatggagggaaggaaggaaggaaggaagagtgagagaggataaggtattacaatgaaaccatgttttacatcctggcatagtacttttatgttttaacagaagcagtgatatttattaaaaattcaaaacacaaaaatgaagtttcagaaaaactgtcttcaactgatccctcatgttaataggaatgccttcacttaaaactcttcttaaactactcactggggctaccctgccagctaccattttttagtctttcttgattccttcattgaccaaatatttattgagggcctaccctgagccaagcaagcactaggctaatgcagcaattagagggagcaagactgatgcagttcccatcctcaggcaacttagatagagaagagtgtttctagaatcatggctcaataggccagagagtctggattcatcgttatagtgtgaggcccaagaacctgcattttcaacaggtctccaggtgacttagatgcacattgcaatttgagaaccactgtgctagcagagattttatgtcaaaaaagatggataattcattgccaagaaaaagcatggcaggtaaatgattgtctcaagtcaggaatccaggtcaggagtgagcaatggtccagtatgatggagctagactgatcattatgcacaatcccgtggtgtaattatgggtcttccctgattcatatgcggatctgagttatcactgaaatggtgaggacatttcctttacagaaagcagcatctttacaggtaagggactttggcggatgtttatagcaggatatgtcctttgggtaatctactagatccgttttcaagaattttgatgcaggaatgttaactccgacgtctatgaatatctgccagcagtgacttctgtgtgctctggcaaatgtcacgaggacttagactctttagcacaaagattcccagagaaagggactgtgaactgctgaggattagggtcaactcagctagaagctgagtccttgtcttgaaatatgtagctaaaataattgtttttctctctctgattggttgaaaggagatcaaaattaaatgtgcagaagaagttaagatctaatgcgtatcctgaaagcgtgctcaagaaaggtctaggtgagagagaactgtgctttcaacatttaaataacactgcttagcatgattacatgaagccaggtagaaatccacttacctatttatgcaattatgaaaacggaatgaatacgctgtttggaggatatataatattcagatggaaaccttcaggtttttctttttctttttttttttttttgagacggagtttcgctcttgttgcccagactggagtgcaatggcgcaatctcagctcaccgcaacctctgcttccctggttcaagcaatgctcctgcttcagcctcccaggtagctgggattacaggcatgcaccaccacacccagctaattttgtatttttagtagagatggggtttctccatgttggtcaggctggtctcgaacttgcgacctcaggtaatccgcctgtcttggcctcccaaactggtgggattacaggtgtgagccactgtgcccagcctaaccttcagattttaatcaccctctaaccctttaaagccctttaaagacatatctttaaagatatgtgtttctaatgactaattataagtattattttataaaattctgaagcggtagaggtctacataaacacctgttagataataatatttatcatttgaatgagtgagtgaatgaatgcttgagaaaataaaatttaaaaaccagaaatttgtaaaaaaaaaaataaaaggctctgaaacgctaattatcataaactcagtatttttttccatgctagcttataaactttgtttatatatatttttagcaatattcagatctcttttttttattgacatcagtttaggcacgagaaaagttttgtgtttctagactctgggaaaataaatatcgattgtcatgagcagatttaactgatagccttataatttaaaaatacgattttaaaaagacagattcaaaattctaaaatcacaaatgactggtggcatacagacaggccataataccccaagtacctttgaggacatcacacattgcaataattgacattcatactaatgacttcaggtgatcaagaaatgtttatgttaggcctgtatattctagttaaaagacttggaggtgtatagtacaattaaactttttctccataattagtttctgatattttatgggattggcttttattatgggtagaattcacttgggcagaaagcctctttccctagtgactaggcttgtcagatatagcaaataaaaatacaggatgcccagttaaatttgaatttcagcaaaacaactaatcaactaatcacttttcagtataaatatatcacatcctatatttggaacacacttatgccccatgcaatatttgggacacaattatactaaaaaaattgtctttgaaatttaaatttaactcagtgtcctgtatttcatttggaaaccctaccagtgactaaaaagcaacctatatctcagaattggtacattctggaatggttgcacttaagaaatctggctaattctatgagtcaactccacagagcttttcagaagaactctataaacttgagaataaaacagccttctaatgcaaactactgtctttcctctgaaagtctcaagtcaagtgagatgaaaacttgagacaaacctgcaggaggaatgcaaataaagattataagctctaggagagttgatttcaaggagcaaattaactcactaaggccccttgtgaaatcacctccactgaaatgagttctatggtgagggctaagacttttattgaagacaaagtatcatgacactcattattaaaatttccatgtaatgttattggagatcctgtagtctgtttctgtccctcagtcttgacctgcctggaagtcttgtctaactctcctctacctgattagctgcttctttctctgcaagtctccatcttagctctaattccatgattctgtaattgcctgtttatctgtagagttcttccactagattctttgaaggacagggatgtattttctgactttgtattcccagtggcagaacagtgcctggcatgcaatgaatacacaatagatgtttgaatggatagaagagagggagaaagaatggatggatggatggatggatggatggatggatggatggatgatatggttgaaaatattatgttgtacttatggagaggaaaaagttggctcttatgcttgtgtaagaatagtcgtagtcactttattcatatttgttacagcttaaaaaagccaacttatccacaatagaaaaatggataaacaaactggtatattaacccaatggaattctacctaatagtaaaaaggaacaaactactgatgtagtatgcacaacatggataaacttcaaaaataccgtgctgagcaatagaagacatgtaagagtacataatatatgactccttttttgtgaacatctaaacatagaaaactaacttggggtagaaaaacttaaaaacaaagtttttctgggaaatggaaggtgctgggaatttactgggaaggggcataagagaattttctgggtgatgacattgctctatattgatagtaatttagttggataagtgcatgcattcatcaaaagtcaataaatgcacacttgagattcatgtgtttcattgtaagcaaactttacctcttaagagaaaaaaaaatgtaaacgaatactgaactctgtctacatgctgtagtatttagaggtattgtaatgatgtctgcaatttgccttgaaatacattcaaaaaataaaatggattgatggctggacagagagatacactgacacaagataaagcaggtatagtcaaatgttaatagtagaatccaggtgatgagtatacaagtgttcactgtaaattcctctcaattttgctgtattagaaattttacatgacaaaatgctgaggtgaaaaggagcttctggttcacataactatgcgaaggctgcacactagaaaggactctgaggttccctgaggatatttaagacctttctcagggtgtgcaaattacgtctgaggctttctagagaaacaattcatctaacaccagacacccaaaaaccatttggccaaactaggtaaaaccagagagaattctactcagagtatttttcattaccccagccattccagcactttctctcttggaaacactcgccgttatttaaaagcgagagtaaagccccatctccaggactccagctccttctcttgcacccattggcctctgtttgttagtgtctgactgagggaggccatgtcagagtcgataacaggtcgatgggagatgactgactccgagggttcgtgccaggctcagctgctctcttctgcagaagtgtgtgcctgaagatcactctccctgacacaatcctgcagctgctgaaggagaggatttactcggatgaaattcaggcccaaggggaactcgagcatcatgcccacaattagaagtgacatgtgacccaggagcggaattctggctgccagagaaaggagtgagctgattcttttgagttgttctgacttaagaaaactgcctttctaattcctctgcagagggcccagaaagttttctgtttgatcagttaaaatacaaaataataataatattgaaggtaataaatcccttttaagaatgaaaaatgtcacaggcatcttagggaagacagagggctgaagagttcaaccacgtactactggaaatgtctgggccttatggtgttctattcagagaagatttagattctgtccgccaacacacaggggagtagtgcactcctcatcgctgaaggtaagcaaatagacggtggatgagaataggagaggtccctaaagacgattaaagaatacagtggtgtatggactgaattgtatcccccctaaaattcatgtgctgaagttctgatcccccagtatcagaatataaccatatacgaagataaggtctttaaagaagtgatttcgttaaaatgagaatcttaggttggagccctagtccaatacgcctgatgtctttataagaagagaaacagacactaggagtgagcatgcacagagggctgaccatgagaagaagcagcgagggagccgccatctgcaagccaatgaaagaagcctcgaagcaaaccaaccctgcctctggaactatgaggaagtaaattatttaagccatccaatctgtggtattttgttagagcagccttagcaaattaatgcactctctgaaaacttctgggcagtgcattatccatctttttgacaatgaagctctactagcccagtggttctcaaactgcattgtgcatccaaatcatctgaacaacttttgaaatgcaggttcctgaacttcacactataaccatgagaacagtcttcctggcatattgaacaatgctttcaggaacattcttttgcactcaagttcagtgagaatgaggactgtcagtcttgctccctttgattccctgcactagcctagtgcttggcctaggctgggccttcgataactatgcacaagtggggcttgaagtagatggttttccaaattccatctctgaaggtaagctgcatgggggaaagctcttcaatttgttcataacatagaggatttctctgtattattccagacagatattctagtccttgacagatggtaggcatttaataagtaattgttgaatgagtgaatcttataagatgttctagagaactctgcgttagtgaaattgcagtgccaagaacagaatcttttaaacttctatgttggctcttgatatagttttattatatctattatttcatctaattattttatggtttgattttagatatttggaaaatacaggcatttagggagaacattaaagtctcctgaaatcccaaccctaaaatataactatggtgaatattttggttcattttcttcattcataaaaatatgtatttagataagttcaaaagaaattgcaaatacaataatttatcttttttccaaagattatattttcccattttgctacatattttctgaaataggatctttaacaaatgaataatattccatcatgaggatgtcatatttaatcacctaaaatttgacttaaatataatagaaaagaagaaaatgaatgtgcatgtccaaaaaaacattaattttggaagttgcatttagggaggtgaaatttgtttccatgttttattaggttggtgcaaaagtaattgtgatttttaccaccactttcactggcaaaaacctcaattacttttacaccaacctgtaattggctatttggatatctcctccttttcataattttttgattgttttatgcttagaaaatctttttccacattcaaatcagttaattaataacttccactttctttagaggtatttccattaccgaaataatacatgctcatgatgcaagttttgaaagtatatgaaacctaaaagaacttagaaagttgtctctaatattttgaacttctgttgtattccttcccatcaattttcagtgcatatttttatatatttgttataatatagtacctataaaattgtatatactaattttaagtttatttgtatgattataaaatgaacatctgatcactgtataaaatctggaaactacacagtaccatgtggagaaaataaaaacaactaaaacccaattccccaggcagaatcactgttacatttggtatacaatacttacttccagtttttttggttaaatgtatttttacataattgcagatgtgcaatatgcacaaaattacactgattttaatcatttattattttgcatctagaatttatactcatgatagaaaattacacatataaaaacaaaatgaaaaattaaaatcactaatagtagtaattccaaacaatatattttaataactttgtatattacctcatagagtagtattcatgtcttccttgaaaggtagtcagagaatatacatctaatattatgcatatatgtatatacatatatatcacataatacatatgacacaatacttgtattcacaagttgtctatgtaaggtaatacaaacagaagactaatgactgatgtgtactctttaagtcattcaatgttttttcctttcttctatattttgaaagtctctcaaccttgcccttcaagttaccaccttgatttaatgcagagacattctaccctgtactccctccaatgatgattttaattatctcctgaaaattagcttccttatgtcaacctggtcttcgccagtttttttcctccatctattattgtcttacggctttctgtttaccattcagaatttgtactctttttttgggttttagtttgtaaattttttttctacattttttttgttttttctgattaaacttttttttatataattgtagatcacatgcagttttaagaaacaatacagagaaattgtggtaacctttacccagttttccccagaattttaatgttaacatcatgcaaaatcatagtacaattttcacaaccaggttattgacattgatacagtcaagatacagactagttctatatacttcttgttgttcttttgatactcaggctcacctctgtccccctcctttggcctccccttgtacctgatccctggaaaccattaatctgttctgtgtttctataatgttatcatcataggaatgttttatatatggaataatacattacacaccttttgaaattttttttcattcagcgtaatatcttagaaattcaaataagttactggttttatttttatgttttgagacatttatataaatgatacatgtaattgtgagggacaaactttaaagtgatttccatgatcaagactttctagtatttatacatttgtgtaatcctttccccttgagtgtgagcaggacctctaattttcttctgatccatgcaatgaagcaaatgccatgtatgtgatttgttcatgtgtttttgttaagcatgtatcatcatcttgctagagtctctttctcccttgctgatttttaagaagcaatatgccatgaaggaaggagtcatattagaaaatttcatgtagcaaggaattttgagtggtctctaagggctgcagaacatttcttgaaagaaactagacctttcatttgtgcagccataagaacataattatcccaacagactgagggatatttgaagtaattccttccccagtggtgcctctgatgagaccacaaccctggctgtcacctggaatgcagcttggtaagatgctgaagtacagagtccagttaagccatgccaagatttctgacctacagaaactgtgatataataaatgtgtgttattttaagtcgccaagtttttggtaaaaccaatacagtaatctactgcaacttcctttttccactcgatgtcatacttttgagatttgatatattatttaattgttttacagaatttcagtgtctatacaaaccacaactcctctattctaccactaataaagggtgtgtttctgcttcttagacattagaaagcaagtgttttagagaatatccttatacttactcaggacatatacaatagtttctctacaaaatatatctcaaaatgaaattacaagtatatgtgcatgttcaacattactgtaatattgccaatttgctctcaaaagtggttgcatagattttgtacaggacaattcctggttccccacgttgtgaccaacacttggtatgatcaaactaagtaattttgctactgtaatccatgtgaaatgacagctttttgttccctagtattgattactgatgaaactgagcatttcatatgttaaatggtcacttgggtttcaagttaccgattcatgccctttgcccatttttctattgatgatcttttatttttgttattgattcataaggggctcttttatactctggattcttatcctttattgattataaattgccaaaaagctcttccaatttataaatgacatttcatttaacctatggtaatttgtctattttttcaaaatttcaaagtccagtacatccatctttttctctatagtttgcatattttatgcccggtttaagaaatgtttcctcccccaaagccataaagatattcttctacattgcttctaaatcatttcaagtttgctttcatgcttgggtctctaagcacttagaatttatacttttagggtgaagtcagaatttacttttacttttcctcatggttaagcaattgtcccagcttcataaattgagtagctcattttttattgacataaatgttgcttctgtcaaacaccagtttgtctttatacatgtggatctattttgaggtcatttattggttacatttatgtaatatgtctatctgtgagacaaaaccacattattttaattactaaaattttaataagtcttgaaatgtggtaaggttgattccagtgattatctttcttaaaattgaactttattattttttaatctttactttcatataaattttagggtcagtttgtcaagctcaataaaagaaacaaattaaaaaccctgttgggattgggattttcattgaaattacatttaacctatgaattaatttgtggaaaattgccagtactatgatactgattcttcctaacttatgcatgggaattgtatcacgatcctccaaagatatccacttcctatgaatatgttaggctacctgaaaaagggaaattaaggttgcagatgaaattaagtttgctggtcaggttaccttgagatgggaagattatcttgcattatctgtgagcccaatataatcataagtgttcttaaaggtggagaacagtcagtgtcagcgtgaagcaatgtgagaactgctcgatcagctgttgctggctttgaaaatatagagggtacatgaaccaagaaatgtaggcatcctctagaagccatgaacctagaaattcaggtggcctctagaagctagaaaaggcaagaatatggattctcccctagagcctctagaaagaaatgtagcccttctgataccttgattttagcccagtaagacccattttggacttctgacctcaagaatcttaagataataaattatgttgtttttagacactaagtttgtaataatttgttaaaccaatacacagagataggtaggtaggtaggtaggtagatagattagacagagagagagaaagagagagggaggcaataggaaactaactcaggtcagtgtgcgtggatgggtgtttgtgtgggcccgagcatgtgcatgtgtgtacttaaatttatggtagaagtttcttatatgtttgcattttgattagagattgttctctttataatatgacttatttactttattcaagactagctttgagtccaagtatactgtcatttcttttaaatgtcccacccttgcttaaaaagaaaatatatttcctgactttctcagagttatttgtcaagttctatatatgttcaataggaccacacttgctatctacactgttcaattttttatctcttctgacatttgaattactgagagagaagtattatattttccatattaattgtgaattttgcaatttttccttgcaatttcattcattttggggagtcatgtgcatataagttttaaataccattattttctacctttatctttatgtcattactctatttattcataaaatgcattttgtcttgaaatctacttttctgtattaatatattcacactatttttatttgtcttcactttcaagttttctatatcatattttaggtgtttttcttataaacaacaattggctggattttgtaatttttaattcaatttgtgagcctctgttctaacaagcttatctgctatatttattgtgttgactcatatatccatttatttctatcattttattttgttccatttactatgttttttctttgcttccctcttttccccttcttcctacctcccactgggtttttttcacccctttctccatgtcttcctagcctctgattgttttggaaaagtaatgttcttttattaattctgaatggatacttcaaatatttaatatgaacaagtggcttaggaaggataaagtgattaatatctcaatgcttgttcaaaacaatttaagaacttggaatcctccagctccaaatgtcccattctattttacctgctatttgtagaactcaatgcagtcattgttatttttatttcatactatcaatgcttctatagatctagttataagttaactaacataggctgggcaaggtggctcatgcctgtaatcccagcactttaggagggcgaggcacgtggatcacttgagcccaggagttcaagaccaacttgggcaatacggtgaaaccctgtctctacaaaaaatacaaaacttagctgggcatgaatgcacactcctgtggtctttaaaaattttacttgggaggctgaggtgagaggatcacttgagccctggaggcagaggttgcagtgagccaagatggtgtcactgcactccagcctgggtgacagagtgagaccctgtctcaataaaaaataaattaactaaaaataaataaagaaagaagtttcctaatgtcaatgattatcagtgcttcttctgctcctctctgtccttatgaattcgattcttatttttcctgaaatgtaatctttagtatctcttccagggaacatctgtaagtggtaagttcacttagtctttgtttctatgacaatatctatagttcaccatcatactgaaatgatacttcagctggatataagattctgggataatggcaaattttctctcatcccattgagggtattataagacagtattttggaatttctgattgctgttaagaagtttgctgtcagtacaattctttcctttataaacaacctgcttatcccaagttgttttaaatagctttcttttatctttgaggtactcacatatatctccaagttacctaattttcttttgttttttttttttcatatatgttcttcattatgtcaattgaggggataatttcaaaccatgtatttttatctttaaaaattttatttgattctatttcagtttaatctattcattcactcagtgccttgatcttaatagtgtatttattcctatactacctatgcttttagttatcttatacatgcatattttgcatttctgtcactctattatttgattatctcaatttgtgcctctctaatattatttgttatatatgcatttttataatttttgatactgtagctatctttagatagattttcatcacagtaatcctgccatttgattttagggaggtactttctattatgcttctgtactgtagaataggggtatatcatcatttaaaccaatttttatagatttttttaacttagtggatctagacacaaaactctgtgaaaagcacatctttatagactttatttttcatgagaaacttttcattttatctttaatccttttgttttagttttcttgttatttattcagtttattcagtaatatgagtgtattctttttatgcagatacaacttacagagtacgcaaatcttaagtgtatgattcaatgaattcttacatatgtatgcacgtaactaccacacaaatcaagtcgaacttttcagcactccagagggttcccctgtgctttcacccgattggtctatgatttggagtatatctttcagatttccaaagatagccaatatgctgacttacagcatcattcaacggtttcatctgtctttaaattttctataaataaaatcacactgtaaacacctttttggatttttttttttttttttttttgagactgtctcactctgttgcccaggctcactgcaacctccgcctcccagattcaagcaattctcccgcctcagcctcccgagtagctgggactctaggcatgcgccaccatacccagctaatttttctgtatttttagtagagacagggtttcaccatgttggccaggatggtctcgatctcttgacctcgtgatccacccacctcagcctcccaaagtgttgggattacaggcgtgagccacggtgccctgccttgcattttcttttattcaaaattatgtctgagagattaatccatgttgttgcgttcattacggtctttgctacctggtattccattgtgtgtatataccacaatgcatccaacccattctactcttaactggacatttgagttatttctaggctttgtctcttatgaacaaagctactatgagaatttttgtgtatccttttgtgtggtaggatgtgaacttattctaattgtaaaaattcctaaagagcaaaagtcccatttgacagctgttttccctccttccttttcctagagataagcactgtttccaatttagtgtgtatctttccaaatcaccatttttaaaaattctagacatgtataagattttattgtattttaacataacagccatcatgtgaaatatatcattgtaaaccttattgtctttgccatttaaaatatgtattaaagaactttctatgtttgtatacagagtgctcattcattgtttttatttgctacattgtattccattctataattgttaagtagaattatcattttattcaaatatggagtttgtccctcaaaatagatttaacagtatctcataagctttaaaacatggtattcttttttattttgtaaatagtttttacttcaattttatgactgtgcattgaaatttctgcagcatatggttgtttttccttatttaagttcccaattattttggagggaggttggatgggaagatatgtttaaattcaaacgattaattttaatttttagtgcattataatccaaaaaatagcctataaaatttcttctgtgaggaatttagaggcatgtattttgatataatatagaataattattgtatttgaaaagaggtattctatgtgagatattaaaaattctatatggagagagttaaatatacatatttacatgtgccatatcatgacaatcattactgcccttctttatttttgcttacatggtctgttttttgctaatgtctacttatatgggttctggatatgtattatgttaccaagttctttatcattataaaatgatttcttttcttgttcactgcattttgacttggaccttaatttgtctgaaattaatctgtcattccttttttgctgttctttcatattttcctcctcaattgtttcatgtcctattttttttctctctctctctccctttttttttgtaattttgtttcaggttattttcttcaaagaaacatataaatgaagattatttttgatacaaccaagagacttgattttctacaaagtggtatttcaaatatttacatttattgttgtatcaaaatgttaatcatatttctgtgtcctattttatttctgatagcttcctcttttttcgcttttttaaaattatggaagctgtactttgtttatctttatctaatcaggtaattgtgaaggtatttttgccactttcattgatcaaaatgttgtctttcattaatatttatccaaaaaccttatttaaaatacaacttatcatataattaaagttggttttgccagttactttgtgataacctctgtgaatggactaatcatataaacctatcatccaaacagggacatttgacagagaaaggaggcattaggaatgaatagttactatatgtataaaacaagagaactgtagcatgttctcatgtctcttttagttataccaaacttttatttagataatctaagtaatgtctcagattattgtcacaacattattttcatacgttcatagacagtttaaatgattttatatgtatgttcagttctatcttatatgtaagtctttgcccaataagaaaattattccttctttctgtaataaatctcagtagtacatttcttttttttttttttttttttttttgagatggagtctcgctctgtcgcccaagctggagtgcagtggcgggatctcggctcactgcaagctccgcctcccgggttcacgccattctgcctcagcctcccaagtagctgggactacaggcgcccgccactacgcccggctaattttttgtatttttagtagagatggggtttcaccgttttagccgggatggtctcgatctcctgacctcgtgatcctcccgcctcggcctcccaaagtgctgggattacaggcgtgagccaccacgcccggccgtagtacatttcttattatttcttttgccaaatacatcaaacattaggaaattggatctttgttctcttaccaccataactattttcttttaccccattcagtggccaaaaaactttttctctaaataaccagagagtaaatagtttaggctttgtggatcatataggatctgttacaaccattaagtttgccagtgtagcatgaattagccacaggtgatacttaaagcaaccactgtgatggtgttccaataagattttatttataaaaacaggtgggagtcagatttatcctgagggctgtaattgctgacctctgagccaatttgtcaacttgtctttttcttcatatgtttagttattcttagagagatctttttcatatttttttgcacgctgattatagttttactgcctcctatgataattttgactataagatgaattttttttcataaacattcttagcatttttttaaatcaactcctttttgtctttcttcctgcttttttttttttttggtctcggcatagtttaccttttaatgctctccacttttatttaacagaatcaatatttctttatattctatgaaagaaaccccaaaatttcctatggtctatgatttcccaaaattttaaacacatttacatatatatatttgtttgcttgattgtcattctagtttattatcactgaagaagtaaaaaaaaaaaaaagaaaacatttcacaatcccattttgtaacagtcagaactacaactcagctcttgacctgcccaaaatctccctggttgtgaaaagatcaaattcttagttctatagcagaacagctttagcccagttctaaatgcctaacaagcaccaaaaccatatggctcttctggattatgtgtgattttttcctgccctccactgcctgattcttcagtactctggaccaatggaaccaatggaaaaatagtaagactgccagcatgggcctccaccctgagtctccttccctgtgtggctatttacacagttacatcctaaattcctccaccaacaattagttgttgagagccttccaggagccaagcatttccctgagtgctaaggattcattggctaaggatattacatatcaagccaatgtgttagttacaaatgaactaatttcgaggaggtgatcttgaagaaaagaccaatgatatagctgctgagatgagatttaaatgattagaaggagccaccatgtgaaaatctggcgaaagaactgaccaactgcagggaacaaaaagtgcaaatgtcctaaagaggacatttatatatattatatattccaggatcagaaaggccagtgtggctgcagtatggaggatggtgggagacaaagccaaataaataagaaggaatcagctgggtgcagtgggtcatgcctgtaatcgcagctctttgggaggccaaggcgggcagataacctgaggtcaggagtccaagaccagcctggccaacatagtgaaaccccgtctgtactaaaaatacaaaaaaaaaaaaaaaaaaaaattagccaggcatggtggcaggcgcatgtagttccagctactcaggaggctgaggcaggagaatcactttaacctgggaggcagaggttgcagtgagccgagatagagccattgcactccagcctgagtgacaatattgaaactccatctcaagaaaaaaaaaaaaaaaagaaggaatcagatgacaatagactttgtaagccatggtcaggaatttggcttatgtcagaagtacaacaggagcactgggagggttttaacatggaaagatccatgatctgatttatagttttgaaagatcaagagaccaacatgaaggctattgtagtaatctaagtaaaagataattgtgatatggtttgcagtgtagtagtagtgaagaaagagagaaataaatggatttgagtttttagcctaatgacagtgccaatagattcatatgaaagttgaagaaaatcaaggaaccaagaacattgactatatttgggcttaagtaactgagaggagggatttattgctatttactgaggtggaaaaacttggaatcaagcaggagatggtaaaatcaagatttttacccttgtctattagacatctaagcgaaggcagtctcccagtttccaaagttgaactccgaggctatttcctctgtgtatttccagtgtcttttagaagttgttgaatccaaattgatgtaattggtagtactactgaatacctgtgtgtgaccaccttaaagagtcatgtaacatgtaacacaggagtcaaggagaaggtcaaggccaaggtttctactttatttcagtcatgagattttctgtgttgttaagcaggtaaaggtgggctgcctgctagttatgattctcaaggtggtgtcatggttccatagttaactaaatcttctcccggattttggcaatagattcattggcgcagcagatttttgtcaatgcctggctcatattctcttgatactcaatgttactcataccacaaacaattgaaattcaatttttgcctaaggacttttctggctgcagaagcaggcttgatctgtacatggagaaagccagaagtgctttccctgtttatttgctggacaaagaccccatcttcctgacctaggatggtacaattctatggtgtgttctacaccatcttccagaggttcccagaaataaaccccagcttcccatggaggtaacctattcattcatacaccttgtattggctttcttcccttctctctcattttcctacttttcctattagtacttcctagatttaattcccaaataaactacttgcacctagtctcagagtcaactcttggggtacccaaagtaagacagctattatctttattattgttttctggttatatgttttgaggtattctttgatttcatcaatattttaattaatagcatttggcctgatttaaaaaaaaaacatatcctagaatattttcaaaatacagaaaaagccaaaaataaaaaataaaaatcaccttgtaagccacagttaacattttgatatttgtggtatattttttctccagtctttctgctctctcttgtccttctttttcctattttcaagacaagtgaaaagagactatgtcagaaacaattccttaaatgccatttattccagacacagccctttgatatttgacataaggccgttttgtgtgtgcacaagctttactacagataccgttgtgtaaattcatgaatctggagaatccagtgagtactatgctcaatgaattgttttacatagcataatcactgactactccccaactcacttttaaaaacagagatcagaagttttgcctccattttatagatggtaaaacagacaaggcatggctttcatacatggaaggcatttcaaaggtcatttccttcactccttgaccgtattggctcatttctgctttgctttttgaaaagtcaatcttcttcgtgaccatgcagaattatctgacaagttaatgttgcctagctggcaacttgaaattgagtcattttaaaatctgcattgtaataatgggagtccctcatttctgagcctataactaattcaaaagcaattgaaatctcccaaggagatcacattgtagtgggaaacaatcccccagagtgagaccatgagacaggctaagtccatcaagcaggtatgcaggcaggcaagcagactccaggaagagggagaacccaaaatagaatggggatgtacagttgatcatcccatagtcaggctacttgattgactcccttaaaagtacatgttctcacaaagcaagctaatcctgatgcattgcaccaactgtaaacagagctcatatatttgtgcataagtctgttaatcaacaaacattattagataccatgtaagtgcagagtgctatgccctggagaacacaagggaacaaaactgcactctatcattgtgaacagctcacactggtttctttaaacatttactgagtgacttcaactgtgtttgtgtcagtgttaagcatgtttctgctaacaatcttgagatttggtgaagtacaaatataaaataattattacaactaagtaagtgtcattaataagatgtatggaaaggaatgagaaaaatttgctctatcaaagtaaatgtgtgtgacaacttagagaaaagtgaagtactatttgaatgagataatttttaaaagctatgaaaggtggtgaaatgtcaattgatttggggattcagaccatctccatgctggcttactgctccaaagaaaggaaaggcagccttcaatgctcagctctgagttttaatctagacttataagtccacagaaaatagtcttgagagcaaggctttcaagggagagaaaaggatcttctcagacctccttaaactccatgtttccatttaggaagtgaagcttagaaaaactaatcatagaccaggacagatgtggatatgtgggaaggaaatgtctccacacaggaagggttaaaccatcccttgctggaggatgcaaaagaaagtagagcaaagggttaaagactagcacctccctctccagttctagtgggatagagttgccccccaccccgcaagtgggcaggagttaaacatcgagatgagtataccagctgtcattctcccagtgccacaaggatgcataaactctccactgcatccatatgctatccaagcaaggaagtgaggtaggaggggtaaaacactggatgtaaggagaaaaaaaaggttgtctgagtcattaaccagagagagaggaagagagagagagagagagagagagagagagagagagattagggtttaaacagactatgtaattttaatatctttagatgacaagattgagcgcttttcaccaaaagaggtcctgcgaattagaagcaagagatagaaaataaagatagttgcattcacttaatgaaatgagttacttaaaaaccaccttaagatattagagaagttggtaaaatagggagctctttgatggcattatggagagggaaccttaaagtatttggatacttaacctgacaaaacgtatcttcctttaggttcactgatgagcaggagtgcttggaaccatagcagtacataggaaacacactttatgctgaggctttgcttcaaactacaaaatggagaactacattagcctgtgctgaatcagatagataaaactattagagatgattagctccaattggtttcacacctaaatatgtcactgggataccaaaaaaaaagtgatgaatacactttagaatgttcgagagaatgttcatcagtccctagtgcctagtgctgagttagggcagggtggatagaggcagtgatcctctctggctaccaggtaagaggcagaggaagagaagtctttgagggtgagaacaccaagcttcttctcatataaagatatcagatgggtcctatcaaaaactcctaatgtagataagagtgagaaagctgtgcccactttctctacctcatttcatgcatgatgattccatgcaccatggtttccaaagataaccccaacaattcatcctgtgtggttactatatgaatgtaaggttcctcctatcaagaggtgaagtctatttcccctacccttgagtaagggtggctttgtgatagctttgactaatagagtgatggtggaagtgatattgtacgtgatcccagcccaagtttcaatgggccttgtgttttctggctttgtgatttgggaccaccaccatgagaccaccacatagaccatcaggctagcctaccagagttaagagtccacatggaggtaaaccaaggcatactagatgacagttgacaccaactgccagacttaagaatgttctttttttcttttagatggagtttcactctttttgcccaggcttgagtgcaatggcacgatctcagctcactgcaacctccaactcccaggttcaagcaattctcttgcctcagtctcccgagtagctgagattataggcgcctgccaacatgtcaggctaattgtgtatttttagtagagatggggtttcaccatgttagccaagatgatcttgaactcctgacctccagtaatccacctgccttggactcccaaaatgctgggattacaggtgtgagccactgcgcccggccagaatgttccatcttgtatgtcccagcccagctgaccctccagccaaagcagccacttgtgtgagcctagttgaagccagcagaggaactgaccagccaacccacagaatcataacaaaaataaattgtggttgttttaagtcacgaagttttaaggtgatttgttatgcaggaatagataaataaagcaactaacaaacatgatgtgtttcttgtttctgacccatgtgattagcatcttggattccagggaatgatagcgggggcaccaatagaagtgcggggatggatggggtaagatcaagcagggagagtttcaagattccattgaaaccacccaggatcaactgggtttggcattacagcaatagctccatttttcctttccactttgcttgttggagagtgcagagaaagaaacactagcctgggagtcaggacctgtgtgttctaattattcaccttgacctttagatgacttaagccacccatgcctcaaaatgctcaactgccctgcctatctcacaccaagggctattgtatggacttaaagagaaaaacaactttggaagctctgaagcttgttgcaaacatgagacattgctataaattagatccaatgctattaattagatccattgctatttattgaaaccacaacctcctcaaattattagatgggataaaaggaaacattttatggctggaagtcatcagtactatcatcttgcaaatacagacctttatagaaaaggtgtgtccagccttggaacccagagcagaaagagcaagttgtcccagaaggatccctaagccacagaaaggaagaaaatctataaaaacatgaatcacctgagccttctgtcctcattttcagatctacaaaactggaaaatgtacaacagtatttacagagctctccatgtgctctggggatggaaaatgaatagaactagccataactcatcacctgtcatgtgccggatactctgtgaagatgtcttctatgtgtaatcttcattattcccttcaactgtcctataggattacagaaaattgatattcaagaagataagctatactataaggttcaaaggaggaaggtgatgggattggaaaagtttctatggatgacagagaatatgaggtggtttcaaaggataggtaaaattttaaatggaaaaaataggaaaaactcatactgtaaaataagcaagtatgaggtaaaaaatgataaaacaggatgctcgtggggcaccatttggctggagcagagccgtgtatgtagagagtagcgggagatgagattagaatgtggggctgagactctatcagcaaggattcaaccaaagagtagaaccagtaggaaatatatggacttgctacatggaagcaactttacacaattgcggaagctggttaagcagtctctgtaaagctgttgttctttgcatctgatgctggagctcaaatcctccatggcaggcagtcaggaagggaagaagaagagtgggctagaactcttagaactcaacaataaaagaacaaataacacaattttaaatgggtaaattatctaagtagacatctctccaaagaggataaataaataatcaataagcacatgaaaagatgttcaccaccaatagccattaggtgatgcaaatcaaaaccacaatgagatacccctccatacccactgggatgtcaataatcaaaaacgcagataacaaccagtattggaaaggttgtagacccattagaatcctactgccttgcttagcaggcaatagaacagtcaattagaaaaacatttggcagttgctcaaaataagttctcatatgacccagcaattccactcctaggtatatacccaagagaaatgaaaacacatttccacacaaaaacttgtacacagatgttcatagtactgttattcataatagccaaaaagtagaaaccatacaaatgaaagagtaaacaaaatgtggtatattcatataatggggtattattcaacaataaaagggtatcaagtactgatgatacatgctacaacagggataaactttgaaaaaaatgctaagacaaagaagccagatagcaaaggctacatattgtatgattccattcatataaaatgttcagaataaacaaatccatagaagaaacagaaaatagattggtagctgcctaggattggggttgggcaaggggtgggagagggggtagaaatatggagtgactgttaatgggtatgaagtttcctttcggggtgatgaaatgtactaaatttgtttgtggtaatagttgcacaactctgaatatattaaaggcaaataaactatacattttacatgtgcaaaatgtatagtatgtggattatatcaaaatactggtgttttttaattaaaaataagagcagaaatgaactggaaccccatgaggatgggctaaaatccttgtccatttttgttgcttctgaccttggtgatgaaggagtcctgcagaaatgggatctctttatcagggagctaagtgcacatgcaggtctaggagccagagaagctaaagagggatccaggggcaagtaaagcaattcatgcccaaatgcttcttaatgccaacgaggtgaatcagcacattcccaaccatgcatgctgcaaaatggctgccactttccttctgccctcccagtctcacaagaactttccttgtggctcaccctaactggaaacgtaaaaaagaggaccctaggaaatgtagtccagcctagccaagttgacacattgcaaagccattacagactctattgctgggagctttgaaggcaggaggagacattcttcagtgggaatctacaaagtgttaaaaatagggaagtaaaatattctaacctgagctttggcaaaataatctggcagcaagagggaaaatagtatgtagagacaggaagatcagctaaggatctgttgcataagtgagagttagtgaaagtctgaaaggagggacatgggaaggtaggaggagagagagagacagaaagaaggtggattagttctacttcttagtgtcatatgggcgctgtgttaacatattggaaataagggattaggtaaagaaagaaaagagacataactgaatttttaaagctccaaggctgagaagatggagttaccattaacagagacagcaatccaggaaaagaagcagattcgggcaaaagaaatgatgaactggccaggcctgtaatcccagcactttgggaggccaaggcaggcggatcacgaggccaggagatcgagaccatcctggctagcacagtgaaaccccatctctactaaaaatacaaaaaattagccggtcgtggtggcaggcgcctgtagtcccagctacttgggaagctgagacaggagaatggcgtgaacccgggagacggagcttgcagggagccaagatcgcaccactgcactccagcctgggcaacagagcaagactccatctcaaaaaaagaaagaaagaaagaaagaaatgatgaactttcaggtgtgatagtgtgacctatctggaagtcaaaaacttaggagtaaaatcagaggtttgagatacagtctctgaatcagtctctgtagtggtcatgggccaatggttcagatcaacaagagggaaaggatgtagagagagtggagaagggtcattgaaagcctgagggaagcactcagagaaacagcaggataatcaggaatgttagacttcccagaaatcagatggtaatgtttcaggaagaaatacgtaattacttccaaaactcaagtcaggactaggtatacactgtggtcacaacaccaactagattgggaccaacaaatgctgtagaatgagaggtggaattttttatcaagatttccattaaagagttgagctttcagatccataaatacagtggtagataaggtgagcaagctagggcatgcagtagtccaaaagcagaggaaaatatgttctaagaggtgattttgttgatgttattcatcagccatgctttccctgtctaaggcttttgaaggtcacttagtgacagatccagagccagtttttgacaacaatgatgacagcaactttgaagatgtttgacagaaaacaaaagtggggagaaggacagtgtgttgagtcttaaagcactgaaagatggtcttgttggatggaggaagtttggacatattggcaggaattagaatggatggaactgaacacaaagcgaggatgatgtagtctcattctggagaaacatcgtggactcattggaaaagtgatgaaattacaaaggtgtgaaaccctggaaaagtgtcaggtatgtgggattcctgcatgcactacattcgtcatgacggcaaaactcacccactggccaggagagcttgaaatcatttcctcaagggaaggccacattgctgaggaaatcatccctccctggaaatttctgatcctgattcccctcatttctctagaaatgatatcttaattgatttttaatcattttcatttctcaaagttaattaccctctgaaggtgcctacctatgtgtgtgtatgtgtgcatgtgtgtatgtgtgcgggtgttggtgtgcatgtatacacacaactgtgatcatctgattgtccttcttcatgaaaaataatattgttacaatcttgatactacatgtaaatacagttgataacaagcctttcaatacagaaaaaaacaaaggcaaacaaacaaacaaaaaaatcctgggaagtgtcttcacgttaatgtctaggttataatttctcacattttttcagtttcttacacacttagtgtctcagtaatattctcctggcaagtgtaggccaaaaggaaaacctgatccttttattagggagttaggtccaaaacactcagtatttatgtcttaacttaacagctattgaaaagagtaactcacatacattcaaataaattctccaatcacctggtctccaatcagcctcatctttgtttcccacacttctctacctgaaacatcctcccagctctgtctctacccacagctcctgtcctcatcacacagctcaagaatccccctgcctgtcatggcctccctccactctccaagagaattgctcacgccttcctctgtgcttccagaggactctgcccctgtccttaacatgcagcatcacagttattcactagtgagagactgcataccttcaagtgagggaacatgtttaattcatggctctttcctcagctcctaatggggtctgccaccttctaggtgcttactccatgtttattcattgaatgaatgatcgacgtcaccaaactcaccaagcaactttgaagtgaaaatgtaagagaactgtaggtgccagcctacatataaatgcacagccacatatacatatgcaagtctacatatacgcatgcatttatatgcatgctaacataaacatctgcctacatcccagtcgcctgaatagtagttctggatcctctccctgggaagaacacagagaaattaaataacttgctctgggtgggtcgcatggctagtatattacagaattaggattcaaactcaggcagattaactccaaagttcatgttcttgactaatgtgcactttgattctcattcctcccagcgaaaggtcttaggaatgtatatacaaccaggaagtcttttccaaaataaatgaagtaacataattatactttgcccctatcctccctcctgctgcccaattctccctctgactactcatcattataaaaacatatgaattcgacaaatttagcaagtgggcatttatgactctcatcttttccatgcattggaatactgatctgagcaaaatatggcctttgtcatgaatgagaaggaaagacagagacattgaggtctgtaagaggacaatgcacaaggtattggaggagcattaaataggagggagcaattcaagctgcgaaaaaagatcacaaagccctcagaggagtaggataccggggccataaaacccagggttcccattcaaaacagccagataaaacatattccaaaagatgtagtcaattcctgaatgaagcagatgcatttgagcaggaaaccaggaatcctcccagatgtcccaaagccttgagcaagccattcctcaatgctgggcctcagtttcctcctctgcagatgctctatggagcatgctggattaaactatctttagctctaaaacctcacctcatccttcattagattccatatatatgataaagtattcataacagtgttccaaaaataagaagaaagcaaagaatttaaagtaaatgcagttattttaatcttgggcaaaataacccagagaactaagggaagagaccaatggccacagaacccatgggtcttccagccctgatccatcatctcccttctggaattgcagagcaggagcacttcgtgctccctgctgtttctcatactctgaaacttacccgcagtgagcactgatgaatatcacctagcccctatcctgtgccttcagttgtgctagaccttcaatgcctatgttgccttgtttcatcttctcaacaacactgtaagacaagattatcatctcatactgagaaaacaaactcagagaaattaagtctctggtgtaaagtcacacagcaaaagtcagttgagaatccagatcagtattattttccatttaaccttccttctgctatggcacataaccagcttttacagtgggcaatagaaaagggatacagaataagaaatgagtctagaacaagggatgtctacagagacaaagcccagggaacctgaagcttttattagctgaaagctttcccagcatatccatcctctgttaaaagcacagagtagagactgggcacagtggcttacacgtgagatctctgcactttgggaggccaggaattcaagaccagactgggcaattagtgagatcccatctctacaagaaaaaaagcacagcccgtaaacgctttgattgtttaacttaatttaaaaggaggtatcttgcattactattttctttccatgactgcttgctgttgtcttcccttctctcaagtgctccccacagctggttgttgtcctttcccatccttcaaatttcctcaagaaaatgcctctactggaaacaaatcctgagaagggcagctcctggactttcctgaacatgggacaaagtatgtcaagcatcacacttatttaccctagtttgccaacccagccatcaaacggcccaggcatgtgcatcggtttagatcttctgagaagtgggagccaaaatggaaatagatgtacaagagatttattgggcgaaggatctgtaaaggataaaagggagagaaaacagaagattggagggaacctttggactgcaatgcaggtctgacacttgacaccaggtctgacacctctgaagacagaggaggaaagaaggaaggagtgcatcacaaatttgcagcaactggcatctgtcagctcactacactcctcacagcaggttatttcttgaaaggaaatatgggaagcacatttacgtggctgccacacagtttgatcttctccaaagtcttctgcaattcaagtagattcctgcaccttgggaggaatgatcgactctctggaaaaagtggttacattttgcagggtcggttcctacaaaacctgcaaaaaatagtttgtttatttaaaaaagccaggatgtcttcaaagatacacctgtctcttgtattaatgtcagatagtattgaaaggatggtggaaaaggggtttcgttacctctaatgagtatgatttagcaaaaaataaagaacagggagaaaaagaaaatccaccagaagaacagttctgtggagaatcattatctgtcacagaattcttcacatataaaatgctcactaatatgtattgactgagtgaaccatttccatatttcagctactgacctctactttaatgtcttctggtggagaccatgcattcttcaagcatatatgtgcacctactatgtgccagacattatactcagtgttgcaaatgctgagataaatatatatggctcctgcctttaagagatgaatacttcaatgggaaaatattcagagtaaatggaaatataagcaaatatttatttttaagtgctcctatagcaggatgaacaagacactttgatgactgctatgattagcatgtaatctgttgcaaggaacataaatcccaattcaaattggcttaaatagggagatattgcttctcataagtggtctcttggaacacagttgtattttcctctctttctgtgtccaggaaagtcatctgcagcctaaacgtttctctttcttacagaaccttcaaattcatgcatcaatacccctattttttctaccaagtctcctaacactacagccttgatgatccctttcccaaggtgtatgggcagctgactaaccacctggagtcctctgtagtgcccttgtgccactcaaccaattccatacttcagggtttgttattaacaatgtcctactttctggaatcaagctctctatcatataagatgccttcagttgtaaataacgaacaaatttaactcaaagtagtatttactaaaaagaggatatctgggcgaataacaaagcccttgatgttggaaagtattggtttgattcagcatttgaacactgtcatcatttctctctctcttctgtttgccatggtgttaatttcatcctaaggctggttgtacttcacgattatgatgtctgctaacaaccatgaaaggtccacgcctcttcaggccatgtcaagagatggggagaacaagttattatgaaaagctctctaagtaaaatgaggaagtgcaattccaaaaactcctagatatcatatcttcccattttatgggcccacatgggaccatgtgctcagccctgaaccaattgctgtagccaaaaaatacggtttactaatgaaaatagccctgaaccatgtacaagagttcagtcttcttctcacaaaacacatgaatttgaattggggagatgttgatctaaataataacaaagtaaggtttttataaaagtggatgctggagagacagccacagtttccactacaacaatgataatgatgacagcaaacatttcctgaaagcttctatgcatgagacccagctcacagcttaagattcctagaatggacatatctatgctcacagcatgcctccaagaaatccagccagagaatcatgagcctagcccttctgcaagccccagctgaaacaaaaacccaacccagctcaactgagtctcctctcaccccttcccttatctctaaacacacttattttactgctgtttgcttaaagcatggggcagacataattactgaattaggcaagatctggaaagaaccccaaagccatttttactcaaacagaaatcatttgttctaaggagcccacccatcacctcctgaccttggagcttaattaattttacacaagaaaagtgctgggtgcccctgacccctcctgttggagacattcccattaagaaggttactgcctccctcagcagggacccagctgaaattggctataagggctctgtaaatctggcacttgtccgggcaagaaaactgagttttctgaagcaactggagaggaaataaaaagtaagtctcacctcagccagagttgcctccttggttcagaattgccattgtcactagagttttcaaagaagccacaggaaaagcgtctgcctgggactccctgatctccacctcctttcactgagctgactccttgatccttcagtactcatcttggctgctcttccttgaggaagtcttcttgactcttccttcaaccttgcagattgtgtaggctacaaccctctgcgtttgtcacacccatggccctttttctctccaccatgcatctaacccaactgagcaaaatggcttacttacttacctatgaccccctctagatcatgggtgccttcagaataagtacagagtgtatttagggccgggcgcggtagctcacgcctgtaatcctagcactttgggaggctgaggcaggcggatcacgaggtcaggagatccagaccatcctggctaacacggtgaaaccccgtctctactaaaaacacaaaaaattagccaggcgtggtggcgggcgcctgtagtcctagctactcgcgaggctgaggcaggagaatggcgtgaacccgggaggcggagcttgcaatgagcggagatcgccccactgcactctagcctgggcaacagagccagactccgtctcaaaaaaaaaaaaaaaaaaaaagaataagaacataagaacataagaacagagtgtattcaactttcaactacatccttaacctcttagaggctcgataattaccatggaaagaaggaatagaaggggataagtaggtagacagacacccagtagatgagtgtcttgttcatcctgttctcatagctccacaggcctcatcatagaatcttcatgacgtaaacttggagctgtctgctttcctacgctgcaaaccttgatgatgatgtggtattatttctgccttccttctccagcacagaatctgagggctcaagggaatgactggcagacgaagcctgaaggggatggtgcaatttcaaaattcaactaggaaaaccagatgtcctactcttggagttacggagtgcaggtgaggaactgcctatcacccttcactgctaatgagctcttcttcccacctttcccacaaagtgaggctgaaaaaaatcttttcagccaaattcaactgcagaaacactggcttaaacaaatgtaaagtggttcctttaatggagaatttcttagaatttcagatcattgtgtgatatgaaactgcagggtatggacagaagggtagaaaattcttttatatatatatatatatatatatatatatatatatatatatatatatatataaaattagtagccaactggatattttgttgtttatttaggagtctaacattgaattactgtcatattgaatagtgtttcacaaatttatttgtggcataaaacaagtttcttaaagagatttggaggggttcttttttaattttttttcttagagacaggatctcactctgtcacccaggctcaagtatagtaatgtgatcctaattcactctaacctggaaccaggctcaagaaatcctcctgcctcagtctcctgaatagttaggatcacaggcatgtgccaccactcctggcttttcttttttttttttttttttaaatagagatggggtctcattttgttgccaagactggtcacaaactcttggcctcaagtgatcctcccacttcagcctcccaaagtgctggaattacaggcgtgggtccccatacccggccctgtttgttttttaatttagaatttgccgtggaccaacaggcagtcgtattctccacaactagtgcacagctcatgctgcatgtcatccacctcttttttctccctcaactccctctctctttctccctgtctctctctcccagagaaagagaacataactggaaagtgagctggtgcactaaagcatcaccaccatctgtccatttcccacactaggagatacctctgtattacgcagtcccatggcagaagcttctggaggaggaaacagatttcccttgccccttcagttgaagaatgaacatcaggaccagagctttgacttgccaatgactagggtggcctggtctagtggaaactgagagcctcttatttctcgggctctgcttgacaaagctatgtcaaaccaaagatgctgtgcaggtaggacctggctttggaggtgagatctctcatcatcaccatccaccagacactcttactctaatctgtcttagccatccaacagcccacctcccactgtgctggctttaagaccaaccaggaatcctttgtccatccccaactctagtgacagtgacactatgtaagagggagacaaaccaatggagtgaaataagtgtcaatcaaggaaaagagctccttgtcttgtctgggctacccacctctgagccctctggcttgcatggcttacttctcagtgagctgagacttcagctccaccagaagggttcagtttcacaaatatcttcaccaaaaaacacctcctttgctcccagaacaggaatgccccagtgccccatccatatccatgggtcagtcttaggattgaaggagcctggtttctggctgaagctctcaccaagaggattactcaggtgtaccagacatttttagtttttttaaaaaataactttaacttttattttagattcagggggtacatgtgtaggtttattacccgagtatattgtaatgatgatgaggttagggatgtgactgatcctgtcatccacatactgagcacaatacccaatagttagattttcattccttgctcccctccctgactgccccctctagttgtccctggtgtctaccattactatctttaggtccatgtgtacccaatgtttacctcccacttacaagtgagaacatgtgatatttggttttctgttcttgtgttaattcacttaggatagtgacctccagcaccatccatgttgctacaaaggacatgactttattcttttttgtggctgtgtaatattccatagtatatatgtaccacattttatttatccaatccaccatggatgggcacctaggtagattccatctctttgctgttgtgaatagtgttgcagtaaacatgtgagtgcatgtgtctatttggtagaacgatttgttttcttttgcatatatacccactaattagattactgggttgaacagcgattccgttttaagttctttgagaaatctccaaactgcttttcatagtggctgaactaatttatattcccaccaacagtgtataagcattcccttttctctgcagccctaccagtatcttttgtttttgactttgtaataatatgagctttgttttttatctgagtcagtatgcaaaagccagaatagatctttctcaccccagtcatcagtttggacatatattggaaattcagggagcaagtttctctccaggccacttttttctatatatttcctcttcttaagtgatataaggccccccacttgtgttggtgtcaagtggccaataagaataccagtaatactcatagttataggatagtaatgagttaggtacttgatatggtctggctctttgtcaccatacaaatctcatcttgaattgtaatccaaattgtaattcctatgtgtctggggaggaacctagtgggaggtaattggagcatgggggcagttcccgcatgctgttctcacgatagaaagtgagttgtcgtgagatctgatggtgttctaaggaccttgtccctctttaatctgcacttctctttcctgccaccttgtgaagaaggacatgtttgcttctccttccaccatgattgtaagtttcctgaggcctccccagccatccaaaactgtgagtcaattaaacctctttcctttataaattacccagtcttggatatttcttcatagcagtgtgaaaatgggctaatacagtactacactaagtactttgcttatataatctcatttaatccacatgtcaacctaggaggaaatagatacaagtatcctcatctcaaagatgaggaaatcaaggctcaagaaagctttagtagttgcccaaaatctgcatcactccaagttctgtactttaaatcaatgtgttatattatctctgactcctgtaatgagcctaaagagacaaggggatggaagacccagatcttcccaagggatgaaagactgaacaaagcattctgccccttacttcttctgactccccatccaaacttatttgtcagatgaaaatgggcaccgaggtcgacgttgaaaggaaaagtcatgctaaaagagagcctagtttggaaaggggtgactaagacatcaggatataaatattttcttgatgtaagcataatgtgtgaatagtgttcttaattctaagccctgaggttttttggcatcagccagactcacaaccacagcactgtcaggtagctggggtgggagagatcaatggtcagccaaagactcctgttccccttctgtatcaataaatgacagctgaagagctcttacccagctaagggactacatttctcaggctcctttgtactcatctgtggcaccaagttgtggaatgtagacagaaataatctgttctactttcaggcctattggaacctcacacactgccctcagctctctccctctttcaatataatggctagtgtcaatgcccaaatgacctaattacccatgagaagcccaccttctgccgccaattagactttatgggagtaagaaatatatttcttttatgtcacatcagtgaggttttgggttttctccgtcatggcagctagcaataccttaactagtacagagaccacaccggcttgatagacttgggctccaccacactgaaaggaccagttttctctcaagacaaaagagaccttgaggacctcagcctggacccatatctctacgggttataggctaggtccctaaccctaactcatcctatcttactctgaagccccatcttaccctctcaacaaatgtcttcctgttgtagacagcagctagcagtccctgaacccagaaaacttcctcttcagatctctgcaaggcctaaaggatctttcaattgcatgaattcaaactcactatccacacattcccctcatactcacacccattcccagcaaattgtccttcactactctaagtagaatctctattgcattaagccatatctataccttaatttaatgttttataaattgtggaatgctatctagtattgtgatggtaagttgagattaatcaaaaatttcaaaaaatgaaatagaagagaatacaaaatatcaaaatgcattgcacatagcaaaggcacattttgctttgatatcaggatataaatgttttcttgatgcaaacataatttataaaaagtgctcttatttttcttatttctcaacagatacagatacttctgtatctgttttgttatacttctgtatctatctatgtgtctgtctgtctgttaatccatgcattcacctgttggtctgtccattcatccatttattcatctatccacccattcatccatccatccatccatccatctatccatccatctatttatctatctatccacttacctacctatacacacacatatatacacacataatatatgtataataagtcacaatgtaaaatatatgtcttactaattatttcagtcaaaaacgtttgaaatctctttcctgaatgatatgtcccctcactctaataaattcaagtccttccttttaggggtttcttctttatctaagattgagtttccccaggatcattgtcagggatactacatatactttcttatatcaaatcagctgaaagctttaatgatgcatatactttcctttttctttcttttttttctttttcttttttttaatttgagatggagtctcattttgtcacccaggctggagtgcagtggcacaatctcagcccactgcaatctccgcctcccgggttcaagtgattctcctgcctcagcctcccgagtagctgggactacaggtgccaccacgcccggctaagtttttgtatttttagtagagatggggtttcaccatgttagccagaatagtctcgaaatcctgacctcgtgatctgcatgccacggcctcccaaggtgctgggattacaggtgtgagccactgcgcctagccatactttcatttttcaagccagcgcaaagctttaaataatttaaaaatgtggacatccagttcatttatgattcctaaaattttgttcttttcttctctcctctctttaaagtgtgttgcatctttatctctgtctggagaaaattggtcccagccaagttgtagggttacggcttcaaatatacacatgcttatctatataatgctgtgtgtatcccttgtgtccaaaagagtacaccccaggatgatccacgtggctaattaagagtttgactcatatatttttgataagaaaatattggggaaaagtctaaattatttataaactaggattatgtattaaaagcgaattcaatatacatgtgtatataacaaatatttattgagcaactactgtgcagcaggatgaagataaaatggtataagaagagattcctatttttcatgtaccttatggtttagttattagaaagttgttttactgccaataaatataagggagaaaaaaattcaaaattatcaaagtttttaatagggactaactcaccaatgacttcgatgtttaatgaggccaaaactcagtatttggatccctttgatgctagtatcaaggatgttgattttcttaccctcctggtaaagggaaactggatatgctgaaagctccttggcattaaaagccaagaccaaagacggtaatgaaatcatggtgcactcaagtcatcaccaacagggcagcagaggttagaggcatccaattatagggagcccctgactcatgcttcctcctggttccctgtctcagaggcagctgagaggctggtcttggaagtatatctgtacagatggttgatgtctaattaacaagggacccaataacatctttctgaaagtcccaatttgatcatattctcttccaaccagttgtatcgcttcagtggcttctcattgctattggggagaagactgaaatccttaagcagtcctacaaattcttccataatctggatgctgcctgcttggctcctgcgtcttctcctcattctctggagaattcaattgcacataccatataccttcttacattgggcatttgaacatgcatgccatctacctgaaataatctctcacttctttccttgactttgtttcatccagttaatgcactcatcttccagacagaagcctagggatcattgccttagacaagccttcctttaccttcctggactgagtcaattccccttattatttactttaatgccaccacatataacttctccatagcactttaacttaattgtaatgttatatctttgattaatatctgcctgagggtaggaataatgtgttttctattccctttcattattttctttctttcattgatgcctttgggtcctagagctgtgcctggcattgagtagattctcaatagcaggttgttgaataaatgcacgaataataatgggagtgtattgctaacatctggaacagcatagcctagcaggataggctgcctaaaatttcatttggggaggaaaactaaagacgacttcaggataagtgtctagtccactacacaaaagaaacacaacctgaaaacagatagtgaggatgaagatcactccttcttgaatgggtagagagcctcttctccaaacataaaagctacagtgacatttcctgggttccattctgggtgatgaaagggaatgtttgcagtacatggttgcttctcttaaacatattccagtaatgtcttaaggttaagagagctacaagtaggttgagagaggcaggctatattttttgaaaattagtaagagaagggtaagatcagtgataaaagatctcttacactttgaggagacccattttgctagtgacattggagtcatggtcacatgggtcccttccaggctgctatggcacaggacagctgggctgagaggctgactggaaaagcttggatttcatgagtaggttgaagagaaagacctttgtggatctcagatgggaagacaagagttcccactcatgcataataatcatagtgatattaaataccacttactgagcatctattatgtgttaggtactttaaaactttatttttaatgtttaaaacagctctgaaagttcaattttataatctctatgttacaaatatgaaaacggaggctcagactggttaagtgacttgcccagctgctaaatgatagaaccaagactcaaaagtggcttgtggttgtggccatgcttcttcactcacagaactggccctgggggctgcccatgaagacaaatgaacttttgcatagtgtccttaaatacaaataaattacatggacattgcaacctacttttcaccaggtatcaaagacctggggtacattcccaacacagtgtgctttcttcctcctcaattccctttgaagttagtgggaagtcagcacctggaggctacagagaatcacagtggggctgagtgtccatcttgattttacactgtccatatttttaataaaataatccagaatcaatctctatctatctacttatctacatatctatcttttcccaatttaatgcggtagcaccaaataattttctaattcaatgataaaaattaaactttctatatgcaaagtaggtcaaaaatagctgctttaattatttaagtaatatccaaacaggcaaacatcaaaagaagctcaagttgcaacacaaagaaagaaaaaaaatctttagaatcagcaacttttctaaggcaaacaagatgatctcagacacatgcacaagctaagtttaaggctttctctttaaaaaaaattgcaatttcattgatgataagatcattaataatactacaacatgtccacagcatattcttatcaacccagcattctggtcgtatttacatacaggctatttattgctatggggtttcaatgaggaaaaacaaattcattaaaaagcctagaaattagtaggaaggactgagatactgatgaggttccttgattctaaacatggctggctatgctaacagctcctttggaatgcttggccctctagaatatagccagaaagccaggtgagcgttttccgcactaaatgcttattccctacattctgcatcattttgtcagcataaagtctcttctctggcttccctcctttaaaatatgagcatttctatggccctagaagcccattcttaattcaaatcttttctacctaacatgtaattttttttttttctctcctcaactaaacctctctgaagcatcaggcactgtattgggcactgaggaataagaacacaaagagaacagctgttaaagatctcacagaacccaaacaactaaggcataatcaataaaataatagatgcatatccagggcttcaagaatacaggaaaactgaaagcttcacagaggatatcacatttgagcttgagtcttatgagggaaaaaataaactagaatctacaataagaaagaaggcatctctggcaccggaggcactctatgcaaaaacatagagaaatgagaatggcatgttcttgcaagaaaacgctgagatggaataaggctgtctcctaggggcggccagaaatgtaactgtacacgtatattggggcctcctacatcatctgggacttggttttatctggagggcctatgttgacaaggattaactgaccatcactccgtaaagtcttgtacagcagaaatttgggttctattctgtattatgacttactatacaactaagacaaattccttcccctctctgagaacatccactgcaaatcttaaatgcctccccagaatcgttccccagtggctcctgcctcccaaattgtgctgtcactgatgggtgggccagccactttccctgggaatgctgagccctgggcctgggccaacaagccacatgcccagagttctggctcctcctccacttccagacttagcaggaacaccaatctgccttggtggcatctggcaaacagaacaaacaccaaaaggtcaggtgacatgtcccagaaatcagggaattaactgttcgtgggctgagtcttgactaatgggaaaaaggagatggaagggagccaagcagataacatttcctctttcctgccctgcagactactccatttcttctgcagccagtccacccaggttcttcctctgaggtgacttggtctattgtgaaggagcacccatgaggacacctcatttcccattgcttcccaggattccttgccctactttcctttccttaccttctccttgttctgatctgcaccttccaagtcaaacggataagaccctcagttcttgcttcaggctctgttttctcaagagcacagcctcagcctgtttttgttttcaaaatgagagagatggccaagcaccctcaaagttacttctgggtctgagattccaaagtcttagttctaacgttcaacagaaccttgaccaagacttttcacaggccgggcgcggtgtctcacacctgtaatcccagcactttgggaggctgaggcaggcggatcacgaggtcaggagatggagaccatcctggctaacacggtgaaaccccatctctactaaaaatacaaaaaattagctgggcgtggttgcgggcgcctgtagtcccagctactctggaggctgaggcaagagaatggcgtgaacccgggaggcggagcttgcagtgagccaagatagcgccactgcactctggcctaggcgaaagagcgggactctgtctcaaaaaaagagaaaaagagttttcacaaagcaggcaactcatgtccatcatgaagtatgcaagtcggggcaccactttctgcattgggaaatatttctaagaggtttctagaatcacccccactttacatatgggggaactgaggctcagaaagtttaactcacttgcccaatgccatgtaactaaaaagaaccaaaattcagactcagacagtctgattcctgagcttgtgttctttgtcactactgaacactgtgtctcttagactcttctggatttactcttcaaacctgattaaattttccatttcttaaagactagaaaaaaattcaaaatggaattatgggatagaaaagcaaaatgacatctcctgggctgcaccaaaaatacaagggagaagggcaagaatagtatgccgtatcatttaaggagccaaggtcatatattcaacaaccagttggttgtcccacattttagcattctttcccttaacttttccttgtaagagaaatctgtaaggcagaaaaacattcttagtaagaaaaaaataaaaccctgatttgggttatgaaaatgtagctgctgtaaacccaaagaaaacatgtcagttcaactccacctaagatcgttttatgccccagtataaattctaacatgagcttcaggagtggtatgtgaatcttgtttttgttgttgttttttcttttttctttctttttcttttttcagattcatgggtctcttgaagagctagtcatcctagcctattaataattttaatcttaatttctttcccacttctcctactctctccaataatgaaaaaaataagaccttagccatttgtttcccaaaaacatggagcctgtttcatgactattgggagcagatgttaacatacatcccccaggagtcagtgcaggtttgaaaccataacaggagcagacaacttacctccagcaaggctattaggtacaaggggtcagagagatacaaaacaggtattcccactggccaccctgtccctgaaatgcctcgccttccgtctacaaccccagccttccacagggctcatcatccttcacgaatgacccccaatcttctccaagtaaatgatttgagtttctctcatactttctcagtgcatgtgacagtttaagggaggttaccaagaaaaattcttccatacccaagacaattctcccactcacacttccatacaagcacacaaatgacctcatggtttttgaggaaggtcagctcatgtttcggagtctaataatgcctaaagcaagagcaaggaggggtgttgtggctgtcagaggcatgggaaaccacagcttgttcaggaatcctcaaagggcatgtgctggagcttttcaggattgaggaccagaatccacatggtcgaagacaatctcaattttgtatatctttgtagctttagggttttgaacactttagcttcccaggaagatacatgagaggaaaggttcgcaacaagtattgaatgaattaatgtatgaaatgaatgaattcaattgtttccccatccatgataagtacaaattacttcttcctcgaagacaacctgatgttgatgtttttgaggtcaggcagcccctttgtcatttacaaacaacagactttaatctcctcgagcttgttttccttaccggcacaaagagcattatagtctctatctcaaagaaccttgtgaatattgaaggggctctatacatataactacctgacacacagaggtgcttagtagttgctagtttactttccctctttgccttctccatgttatctgaattccctagtccataatcctggttccaccaagccaaggtcagtgccttggggtcctgtgccagtttctgaccaggaaacactataccatagagtcctccagatcgcaggctctgaaagccaacttttttcacttgaataccagctctatccttactagctgtgtaactttgggtaagttacttcacctctctgaatacctgcttcttctccatctttcagatggggacaataatagtacttactttgaaaggattttgtggacacatgtagagtttagaatcatgtctgagctgagaactgctcaaaaagtgtaactggtattatgacgtctatataagtctactctacgtgaaatgtgaacttctcaagccaagaaccaaggtttcaatccctcaggcccacagcagatattttgtcatctagcctgactctctaggcactttctgctatttgagcaaaggctagcttgctctccttaccctgtactgcccaccatctcatctttccaaacctcagagaacttgggaactttctgagcaggcccaggagtttgggaagtgcagcatctttggagcacatagcaagcctctgaggcccctcttcagaatcccaggcctttgggaagcacacagtgaggccttcctgcaacacactctcctcctgttaatgaaacccttagtttgggtcaagtttcatgtggaattcatgacatttttagcttcatgacaatgcctgaacctcacctccaccccaccccatttttctgtgtgtgtggttttttttttggtgaatgggtgcatgaagggcacaataaggtttattaagtaagagacagaaatgcttgcaaacctttactgctcctcccaggcccataaacagttcctcaatccttctttgcaaggtaataaaacctggtgggaggtgaactctgggacccatggggtaagggtgggtttgcttccagcctgaggctgaaccccagggtgagcccatgcagcctccttccctgctccatcctcaatgggagggaagtaaagggagaacccatagagctgagctgctggaaacccaaaaagcctgcaccccctcagattgcctgtaaaaagcagagaagtgcagatctcagagaggctagaagcagcctggggacccaagaggaacctcgggaaactctgcagtcagaggcccttcatgaggaaaaaggcagtacagagcagaggagagatcacagaaaatgagccagagtgctgtgttctgatgtgtgctctgatgcttactggttaaggggccctgagcgagttccctgacctctctcatcccgtttcctcatctgcacatgggaataatgagatactgggatgtatgcatgaggtcatcaatgcaaagcaactcacactctgccaagaaggacccaggagaatggcatggcaaatcattacttaaagagtgggttcaacacacaaggcctgaaggattattgacatgaagctatgtggagttaacgatagcaaccagagaagttacccgccacatgtatgttttggtgataggcttgccatcttctcagagagcccagaagaaggcataaccaggaaaagccctcaaggatattggcagacatcaggggtgctaagaagatgggccagaatctctccaggggttggcacctgaggagtccacctgtcattgcactaccagcttcctcttctggcttgtgcgcagaatcaggtggccctgattttgcccagtgatcatcccaagcccagagccagcagtgcctggacctgggctaggatggacttgtgacctgtaaccctgtggcatgcaagacagcatatgatgatgcactgtagcaaggagggatatagagatccatgtctgggctcaaaaacacattggcacaaatagaaaatgggaattgcgttttaagagtcacactcataggccaggcgtggtggctcatgcctataatcccagcactttgggaggccgagccaggcagatcacgaggtgaggaggtggagacaatccgggctaacacagtgaaaccccgtctgtactgaaaaatacaaaaaattagccggcgtggtggcacacacctgtagtcccagctactcagaaggctgaggcaggagaatcacttgaacccggaaggcagaggttgcagtgagccatgatcgtgccactgcactccagcctgggcgacagagagagactctgtctcaaaaaaaataaaaaagagtcacactcatagtaaagtgtcaaggcttctagtcatcagttatgtcttttatgacacttgactgagttaggttttttaccttcaatcagttaaatttccatttgtaaggcatgttaacaaaaccacatttcatttcaaacattcaagggattctctaatagatcactggtgtcttccttttggaaaagttacaagaatgtgcactccgcccagttgaaagatgaagctaaaaccagaactaaaaattgatgaaaaaagtccgctagggagcactgaaatcaattaaaatacaggtaagattaaatcgttattttaatctttgtaataaaatcatgtgccagagtcaatattttggagaaagtcagtatttaaagtaaataacaacaaaacaacagcagcaatgctaattatataccaatattttgtatctaaaattacagaacctgttaaaatactgcaacatggaagaggaaaatggtagagaagaaagtaaaagtatgataaaattcttaagcaggaagagctgagtttaatgctggatacataaattataaaacaataataataataaagaatataaaggtattaaaaacaccccacaaaaagcaagaaacccaaggaaaagataaggacatgttaaaataaatttttaatcaaggtgatagaagagtgaacataagagttataattttagatatatctgtaaaatatctgaaaaaaagattctttaatcagaatcaaaacttaaacagtcctcaaaatttttgaaactgaattatcagttaaaataaaattaagaagtaaataatagtcacactacttgtatcagacaacagattaacttggatagaaaaacccactttcaaatagtaaaaccccaatccacaaagaaaaaatgagaaaaagatgcaaggaataataataacaaaaagttaagtgttcatctctcagtttttaaattatagaagattttattttcttcatttggtttatctgcattttctacattttcttcagtgtacacagcagaaaaagagttataactttccctttattaccctctccatttccaaataagcaaatgcaactcaggtgtcatctcttcctggaaaagcccctgacattacaaccccactcctaaatgagccctgtgaggtacccttctcagggatgtgccaagccagcccccataaactagagagcagggtatgcacacctcttcccagctccatgtgcagccacgtcaggttagtagcttgaaatctgccagggtggaagcatttacaccatgggaatcagtagatgctacaaatcaagatctctcccacctacagccggttaaatatttattagcacatcactgtttgtgtttctagaaatctgtgcatgtccttccataatttttatcatcttgcactacagcgtttaacttgcttttttctaccacaaattcatgaacacctaagaggcaggacatttcctatgttatctctcacccacaccacggcacctagcacatagctggtggaaggaaagagagaaaagagggaagggagggagaagccaaagaagggagggagagagagataaggtaactgctttcttccttcaaatgtaataaaattggctaattatttataagtatcaaccacagcccattctttggagcatgaaatttttccaactatcaccaagagaaagatctaggtttgcttgctcctgatttctaagaagaagagggctttgcaaagcagccccttacctctggaacttccagccagactagaaggtagaatggggctattattgaaaagacattcctgaatacaaattagcatagcaaatccaagttttgcttaggacatttcctggagattaacaattttcaatctgtttcctcattcagcacatgggaaacatgagaactctcccctcactataccttctgtcatttcatcgaggaccaagtattcagaaagggcaccataaccataaagtacttgaaaagtgtacctatttggttcctcctcactttcaaaatgtattggaatctctttcctgaaaacaaacaaaaaaaatcattttgctattataccctaataggtatctttttggtagtagcttgttcatgcttattaagattaggtattataatatcgtcattaatataaactcctcttctccatgaatatgtagacccataacagaagaagcaacagaggccaaaatcctcatgaaattaaacaaagcaaaccataaaacagtgggaagctcaaccggcttagccagtttttctgatacatactagatataaccactgagctgttatttccattgtcctattcaagttccttcaggttatgtgtgccagtatgtgtgtatggcagcactgcatagaggagagaaggaaatggaaaccactaattattgagtagctactggactcactcactggctcaacaaatattgactgagcgatgtgccagcactggctcagcccctggggatacaagtgaatgagacaaacttttagagtatgcaatccattggagaaatggggcagagccgtaataagaaacacataaacaacataattacagattttaaaagttctagtaagaagtgaaacaaagtgttgtgatgcactgtaaagggagagggatgtagtatttaggaggaacaggagagagttctctaaagaggtgacatataagccaatacatcaattaaaggataacaagaagttggttaagcaaaggtccaagagagaagcattcccagcaaaggaaacagcagaggcaaagaccttaaggtacaaaagaactgagcacatgcaaagatcataaacgaggtcagtatggctagagaggctgagcaagaatgagtgtgggaaataaagttagagaggcattcaagtactaaacatataggacattataaagagtttagatttaaatgtaagtgcaattgaagcatttgaagcagcaaagagatatgggctgggttcaataaaagttttcatctgtatattatatgaagagtggagtagagggtgcttggataagagctgggagaccaattgaactgctgcatggacttcctttcatcatattctgggatttggaggcaaaaaaaagaatttagtgcatgttcactgaatccactgtaaagttttcaaatttgaatccatttgtccaaaggaaacattcagtatcttcacgcctttctcatatgtctggctgtgaaatcttgggcaaattacatcacctctcagaacctcagtgtcttcatttgtaaaagtagtttagctgaatcttccagagtatccagtaaatgttatactccttaatttcttggaaaggaaaatgactcagatctactggaaatagaccaggtagctccaggcagttccctgggccaggacacagccaagcttgggtggagcctcaaaggggccagggtggagaccaagagaggcctagatacctgattatgcatgcaaagtcccacatcctagacacaaaccttcagctcaggaatgtggcttaggcggggcttgctagcaatggaaacagcagagagaaaaccaggaggcactagaagaaaaaaacaaattaatatttaaataattgtaggttggagagatgttgctaaattagcaagcaaaggcagaaagcatgaaggcaaagattgatagaatttatttcatgaaacatccaaggctatcttagaaatcaaaaataaaatcatgaataacccaattaaaaatgggcaaaagacatgaacaggtatttcctaaaagactgagtgtttctgttactctggagaacccagactaacgcataaacaacaaaacagtgtgttagaaccaaggatcatgattaatcaattctgcgtacctgagatctgaacaagaagaaaaaataagaaagaggaaaagataaacccttgcaaattgttaaacagtgttagtaatcaggaaaatacaattcaggacaactatgatctacaattttacacaccctcaactggcaaaaattgaaagtttacaatactaaattatggagaggatttaggtctacagaatttcttacacactgctggtggagcatgacatggtattaccactttggaaaataattgagtagtgtcttctaatagtaaacatttttattgtctatgacctagcaactctactcctggatgcaataatacacatatatcaagacacatagccgggaatgtttagagctacaatgtttacagtagcaaaaccctagaaaccactcaaatatccattaatagatattcacaaatgacagacgcatgatatataatatgtaaaaatggtatatttagccaggtgcagtggcattatacctgttttcccagcactttgggagaccaaggcaggcagatcatttgagatcaagagttagagaccggactggccaacacagtgaaactccatctctactaaaactacaaaaaaaattagctgggtgtggtggtgcacacatgtcatcctagatactatggaggctgaggcaggagaatcatatgaacccaggagacagaggttgcagtgagctgagattgcaccaatgcactccagcctgggtgacaaagtgagactccatctccaaaacaaacaaacaaaaaggctatctttatatattatatatcacgcatctgtcaaaatgaattaagcacaatgatgttacaagtaaccaagtgataaattttagcaaaattacattaaatgaaaagactaccaaagattgctcacaagttctttaagttactgggaaagttatatatttttatatcacaagtagttatatgggttttatgtaagtaaaaattcattgaactgcatacataatgttttgtatatgttatttgtatgtacattataaatcaattctagttgttttttaacgaattgcatacccttttttggggggtctggggtgatggagtctcactctgcggccagcctggagtgcagtggtgcgatctcggctcacttcaacttccacctcccgagttcaagcagttctcctgcctcagcctctcgaatagctgggactacaggtgtgcaccaccacgcctagctaattgctgtatttttagtagagacggggtttcaccatgttggcccgggtggtcttgatctcttgacctcgtgatccacctgcctcagcctcccaaagtgctgggattacagtcatgagccaccgcgcccagctgccttttttatgaagctacaaaccacaatttttaaaacctatcttgtaatactaaactccacttctatttaataaaactaaataaaaatgaattcaggatgataatgacctcagaagagagaaggtgagaatggattgaagggggaggaccaaccatgtttatatatggcttcttgtgaagagactagctgaattggggaaggaacttcacagatgtctatttaataatgtaataacattattaaaattgctaaattaaacaaaattacaaacacaggcaaaacaactaaataaaaggaggctgtgatagttaattaggaagctgtgatagttaattttatgtgtcaatttgaccaggccatgggatgcccagatattttgttaaatattacttctgggtatgtctgtgatggtgtttctggacgagattaacatttgaattagtaggctgtaaagaagatcaccgccctcaatgctcaatgttaggtagacctcatctaattcgttgaaggcctgaataaagtttgtgtaagaaagtattttccctgtgcctgcctgacctcaagcaaagacattagtgttctaccttcagacccagactgaaccacatcatcagctctcctgggtcatcagcttaccagctgcagatcctaggacttctcagcctgcataattttttgagccaatttcttattttagatagatagatagatagatagataaaatagatagatagatcaatagatagaaaaatggaaatatatgtatcttaataaatatagagagagatagatggatatataggctatatagataggcataaatagacatgaagatagatgcaaagatacacacagatatatgtgtgtgtatttgtatatatatgtgtgtatatgtgtgtgtatgtatatttacataaacacaaccacaaacatatcctattatttttatttctctggagatcccagactaatacgaagaccatgtatgaacaacaaaactatgtgttagaaccagggattataattaatcaactctgtgtacctgagttctgaaaaaaaataacaagaaagaaaaaaagatacgttttactatgggaaacaaaaacagaataaaaattctaaatcaagtgataaacgtagaagaaacattttggtatctatacatgtcacagaaaaaaagttaatactttgaacatataatgaggaattccaaattgaaaaggaaaaagcaaacccttcaattgataaaatgtgtaatacacttgatcagaatttttttaagtaaaatgtaaaaggcaaagagaaaatgttaaagtttacttagaaacagaacaaaaataccttttttacatatatctgaatatcaggagccagatttttcattattatagaagtttacaaatataaaaatgaaaatattagtgtttgtacacctaaaaggcctctatacccacagtattcagatcttggtttctaaatactattctcctttaaagtattgaggacttgttggaaaataggcagactccagggatgaagcagaaaaaaaatagaagataactctgaaacatcatgttgcatcaggaaagaagaaagtgttcaaagaatgatagggacatatcacaaagatatggacgccagcttgaagagactcccactagcaacatctaggacaatttgagcaccaaaaatggatgataatccagtcaataaaataagaatctaggagtctgtgataatgtaaataatcaattaatcaatttgaatgaagaagaaagtcttccttacagaatattgccaacttataaatgtaagaagaacaataaagttagaaaattattgataaatgctagatctaggggttgaatgtttgatgagaaacagtgtattgtatagtctcaaataatttacctacaaagggaacaccagtggaaaaccagtaaacttataatggagaatcagacagatacctactgaaccaagtgatcaaaattaatacctctaaaaatggacaaataaatatcatcacaacattactcctttagtttttctgccaaaaaatgcataatctgagtcaaccatgaagaaacatcagacaaacccaattttagggacattctaccaaatatctgacttctacccttcataaatatcaaggtcaagaaaggcaaataaacagtttcaaaataaaaaagaccaaagagacatgacaattaatgcagtgtgtgattcaagattaaatcttggaggggaaaaaaacaaatcattaaaaagaatattagacaattgatgaaatatgagtatggactgtaggttagataacagtattgtattaatgttaatggttaggtaagaggagtgttttgtacgttctcaagtatttagtacaggggcacactgtttctaaattttgtttcatacaattcaggaaaaatttatataaataagatagagttagaaatatcagtgttatgtgtagaaagagacaggcatgtataatgattatacacacatacatgtacaacaagtgaagacaaatgtgaaaaggaagcattgatgaatctatataaaagatattcaagtgttccttatactcttattgcaaaataaacagttgctttacaatatttacatacacatatatataaacagctatactctaagtaggtgggaattcaaggaagtaggtactataatatactgccagtggggaacacgtaagtgggtattacttttctaaatgtggacagttggcaatataaatcaaaaccaataactttgacatggcaaaatagaattatggagatggatgtgcataaatccagagctacaattctcataatactggaaatctaggaagtctagagataacacaaatgaccaataagaggaaaccaagtgaacaaattgtggaacatccatttagtggaataaggatacaatccttaaaagttttagtgcagaaagctattttattacataggaatttttatacactatattaagtgaaaaaagctagtagtaaaaaagaaggatgtgtaatttgaaccaattgtgcaaaaaaaaatacatattaaggtagaagacattattggccctagttcttgactcctttctggatctacatcctttgccattgactttggagttagtaatgggccttgctttgaccaacagaatggggctgaaatgtgtgtgcaccagtcccaaccctaggtcataagtgccctcacacattcccactcattctcctgcatttctgcccatctccatgagaagaatataactggactggtggctttcattcccaggaggaaaatgagagccccttggagtagagcagatctacacagccaagtccagcctaggtcagttaacccctagctgccccttagattcatgagattaagtgactgctgcattaaggcctgagatgaagatggcagcattttctggaaatagctgattgctgtatacctgaggtacacacctcaaaggctttttaagggctacctctgggttgcattattacagattatttctattttctttttatatggtttatctatattttccaaatatttgaactgcatatgtattgttcttggactttttttaaaaatgacctacaaaatgatgacaaaagtaattctaatgagctcaagttcagtggatctcaaaggattcctggaaaatgagtttcaacactcaaagaaatagatagcttcaatttattaaatgtccattataacccaggcactttaataagcgcaccctctttttttggagggggttgcttcactatccacaaagcaaaaaagttatataagatgatttccattttagaattgagaaaactgtgaacatataagttgagtcagatgcctgaagttactcaactataaagtttcagagctggaattcaaacacaggtgtgcctaatgtgaattcaccatccctgattgatacagagacctctcttttccctgatccagacagaattctgctgttgagcttaataactcagccctctatggggtcctgaatgtgcagcattgctctgttactgtgaaattacccacactatacacccacctcccataaggtgggatagtaggttaagaaagctgcaaattctttgccacttttcccattcataggtggaatctaattctcctgcctttgaatgtgagctggccttagtgacttgctttaccaacagaatgctgcagaaatgaagacctgggcttctgtgatgtcctaaaaagattttgagcttccacttgaccacttggaaccccatcccctaactctgaggaagtccaagccaccctttgaagaagcccacatgaagagaattgagtcccccagcagacagcccctgatcagcttccagcaccaaagtgtcagtcctgtgagtgaaccatcttggaagtgaatacttcagccccagccccagttaagctgcccccagctcatatcatgaagcagagaggaactgactcaccaggccttgcctcaattgctgatgcatgagcaaaatgaaaaattactgttgtttgaagccattgagtttggtatagtttgttgtgtagcaatatatgactgaaatagtatcctttttttaagtgatgaaggtagggaggaacaaaggaaaggggggagggaaagaggaagggaggaagggaagaagtatttgtcacatcatttcatggagaaaattgcataaataagtaaaattcttagtaagcaaatgcaccctgactcctgagcctcagtgaagggtgcagttctagctcagcatcaggctcctctgaggctgctctccttgtcagcaaaatcagattggtaaagagcctgaagttactgatgcaaacctgcatttcttcaggcaactgcaaaagcaatgtccacagtagagaggcaaaagctatgtttatgcactttcctgtgtatttatttatcctggcacaggaattttcaaacttgtcattttaaacccaaggaatttttcatccattttggaatttcaatcaccatgttactgaataaaggagatgatgtagggacagccaagctcttctgagtggcacaaatctagtccctggtgacctgctgccaaaaagcattcaaccaaaggaagctagaccctggccatgaagtggcattcttgtgcaagatgcttatctgaatggcggcatgcttcttgcccttgaattgtgattaaatcttgatagaatagactcttctctcggggtctctaatttctagagtggtaaacagcacctaaaagtccatctggtccagacacctgactctaggctgagaaataaataaatgctccaggacaacttgtataccagtcatttgcccatttgttctcagatctcagacccttcctctgctcagctctatattgtatatggctgagttcttaaaattacattccccaaatctctcaaaactggcttatgattagggatggcccaccctaatcagaggtactggtggaagactgaagaagaggaggaagggagaagccagagtatcttccccatcattctttgacttaggccagtgactggaactctcctggctcccattggtgcaggatggatttagctcccaggctcccaggctctgttagctccacctcctcccctctgcacacacatcccaagtttaagctattgatttcttactcctgatgttctggtgccaataatcatgtttctaccactgatttcttagcttcttctactccagattaaatgtttccaattccatcccatactttaaagctgctgaggtatcttacaggataaagaaatcctcatcagtctaccctccttcaacctggtacaattatggatccttcttatccatgagcccagctcgtccagaatctcatgaggtcatcagggcttggatctgagttctttcagttagtatgtacttagctctcaaaatgctccattttagagttaagtcttcttctgtgggtaagcaactccaggtcaacttacataagtccctgaaagttttggactgtgctgtgtatgtatttttattggcagcaccctgccaccatcaggcatagaaggaaagccccggtcccattcactcttccccctcccaaccattcatccatccaaccatttatccacctttccttcattccatccaaccatccatccatccatccattcatccatccatccatccattcatccatccaacccctcactgattcaaaggatcttatagattaagtttagagatttgggaaatagaatgaatgtgaactaaaatacacttcaccactttttacttaactgtgtggtcttggcaaattatttacatttctgagtcttagtgtgcccattttacagaatatgaactaagaatgaaataaatcatttagctactccaagccccagttttctactctgtaaaatgggatcagtaatgatacctacccattggtggatattgtgaggaataagtcagacagtccctataaagtgcctaacatatgaccttgaacatagcgaacagcaagtaagtgtttgttgtgatgatgatgatgatgatgatgatgatgatgatgatgttgaagaggaggagaaggaggaggggaaggacaaggaggaggagaaggatggagatggaagaggagaacaaggagaagaaggaaaaaaggaggaagaggaggcaaggaagatgatgctattcccagaagcaattcacaggtccctccacctggaagtgagtccatataaactttgaaaattcctatgaagtattctgtccatctcctgtggtccaagcaatgccaaaggcccatatggatcagaatccatgaggatagacatggagaccaaagtcacatgaagttgaacaagtcactgacggaccaccagtagaggatgccaaccctctgtatatgagtgccaaaatatagccctctcagaatctcagccctctctgtgaaaaggcaaagctaccacaggccagacccaacttacggtaacacaggaagactggattagatcatgtctacaaagcactttggactccttggaggacagtggtctataaatagcaggtggtggtattattattaatcaggccaaccttttattgaagctaattgctactgatgccaatgagacatttatctgggtatagccaaagaatcagactctacagcagtgatccattatttattcatcattagattagcggccaaaaaagaaatgcatcttataaaaagcaatagtatttattgtctacaagaagcccaaaagagaaaaaaatatcatctgtttttctggtcataaagacttcggtcccaatgccactcctggctgtgactgggtacatgataataagatgaattccttaacatttctgagccttcatttcctctacttcaggggttgtgaagatgaaattaggtgatgaatacttgtcccaagcccactgccaggtgtgaggtaaaggcgtggtagcttccaaggcccattactttttttttttttctttttttttttttttttgagatggagtctcactctgtcgccaggctggagtgcagtggcacaatctcggcccactgcaacctctgcctcccaggttcaagcggttctcctgcctcagcctcccgactagctgggactacaggcgcccatgaccacgcccagctcatgtttcgtatttttagtagagacggggcttcaccgtgttagccaggatggtctcgacctcctgacctcgtgatccgcctgcctcagcctcccaaagtgctgggattacaggcgtgcaacaccgcgcccggccctaagacccatttctaatgcttagggctcatcatttgttaccgtaaactaaactgtcttgtccacaccatcctttgcctcatgaagtctgggcttttattaccaagaaaatgcgtccagtttgggggccaaagaaagagcagggagatatgtcaacagaaatccaaggtaaggtatgcattatgccacgaggccttactcttctttgaataaggttgactctccactccctaattccctgtccagctatgactccaaccaatgaagaattactgtggccaatgccatacttttctgctgcctgaagtctagccaatagctgccctcctcacccatctcttgcttgctggtgattggagggggaaaaaaatggctcacatgtttgaactgaccaatgagtgagagacaaaagccacaatgatagactggcttctaggtctgcataaaccataaaggtgctcccaaataaacactgttgacccaccgtctgtgaagaatcatgggttaccatatcaccacattgtttgacaatctccctggggctcagcagagaatagctgaccaaaaaataaataaataaataaaagaagaagaagaagacggagtcaagatcagcctgggcaacatagcgagacttcacctctatgaaatgtaaaaaaaaaaaaaaaaaaaaaaaaatagccaggcacggtggcacacacctgtagttccagatacttgggaggctgaggcaggaggatcacttgagcccagaaatttgaggttgcagtgagctgtgattgcaccaatggactccagcctggatgacagagcaagaccatgtctcttaaaaaaagaagaaagagaagtaagaggaggggaaggaggaggcagagcaggagaaggtaaaggaaaagaaaagagaaaaacaagaaagtgtcggttttctgctaacaaaagctttaaatttagtgacttaaaaatacgtatctaatatcttacagttctgtaggttagaagtctaacacagatatcactgggctgaaactcaagtgtcagcaaggctgtgctcttttctagaagctttatgtgagaatccatttccttctcttttccagcttctagaggccacccacatgccttgactcattaactccttccgtcttcaaagccagcaacatcacatctttctgaatcctcttccctcgacatatctctttctgatcacagccaggaaagtttctccatttttaagtgttcatttgatcatactgggctcatgaagacattctagggtaatctcattttaaagtcaactgattagcaagtttaactgcatctgtaactttaatcttattttgccaaataaggtaacatttttacaagtcctaggattaggatgtggggcctctctacggagcattactccaactaccacaatcactaaccatttgcctctaaattgtggtccctgggctatttttcctctgaattaccagggtaaggttgatgagtgtggagattcaaaggccacatccaagaccttccgaatctaatttttttttttttttgagacggagttttgctcttgtcacctaggctagagtgcagtggtgtgagcttggctcacctccacctcctgggcttaagtgattctcctgtctcagcctctcgagtagcttggattacaggtgactgccaccatggcaggctaatatttgtatttttagtagagacgggggtgtcatcatgttggccaggctggtctttaactcctgacctcaggtgatctgcccatcttggcctcccaaagtgctgggattacaggtgtgagccaccacacctggctaagaatctgactctttagggatgggtctgggcatggtagaggtcaacaagttccccaggtattttctatgaacactcaagtctgagaacctcttcaaaacagtcctccaacaaggccattatcttccattgacaaattaagaagttgctgcatttgtgtttgctttgtttgaagttgtttctctaatcaattgatgaggttgcttgtaattagaacaaaagattccaattttagatagagtgtctaatagtgtatcaagtaactaaagtatgtactctgaagaagcgggcaccaattttagttcaaaaaaattccatctataatcactaaagaatctctgttatttgtgcttctttatacatcgatcatttatcaaaacctttttctggggtaaatcctgtgcttgctgttaagatacttaggtcaatttgtagcctgttaagtaaagggctcaaactttactaaatgaacccacatggcattggtctgagtctttgagactctaatctaaaaagagttctgttggtttctttccttgatctagtgtcagtccatttagaacattaaggggtactccactcctagaaatgaagtgtcctgtgtgcccagtcccccctgactggtttccctgacagtaactgaaatactaggacattagactaagggcacaaggtggacacacaatactgcatctccagcctgtggctcccccacactctcaaggctaaagtttacttcttgcccattcatgactactgtgtatggaagagggatacaaaaaaaaaaggcacaaaaaatctaacacatggacatatgagggggaacaacagacactggggcctgtcaggatggggtaggtcgtgggggaaggaagagcatcaggaacaatagctaatggatgttgggcttaatacctagatgatgggctgatctgtgcaccaaaccaccatggcacccatttagctaggtaactaacctgaacatcccggacatgtacccctgaacttaaaataaaagttgaagaaaaaaaaacaatctaactgttctggctctttacatatattacttcatttagtcttcacaattctggaaagtgaacttgactatgtaaatttacccatggaaaaacaggggatcagagaagcaatcccttgcccatcaatggcgcttaaaagtggcccatctgggattcagttaaaaatgtctctccttctcttggtggtgggatgtgctctggaaagtgcctgaagtctgtcagtcattcaagctctactctaactaggtttgtgaaaaacagaagtagagcttacacccattgaccagagtattgggaagggtaagatgctttattgggatatctctattgaggggatataattctttacttcccttttataacaaagaactggcttaatcagaaaacagtgtgaaattctgcatgcttatgcaactctcagcacttcgggatatgcacagtcaaggaattcaatggtaaaaatataggtgggtgacagaccatcaattaattaatcaattgaaataattttcaaaataaaatatggagtatctaccatttgccaagcactgagctcagagtctagggttgagtggttgcctcagtctgatttgcaatgctataaaagaatacccaaaagtaggtaatttataaagaaaagaggtatatttggctcacaattctacaggctgtacaaaaagcatggcaccagcatctgcttctggtaggggactcaagaagcttccaatcatggtgaaagggcaagggagccagtttgtcataaggaaagacaggaaggaagaagacaggggaggggtgccaggctcttttaaacaaccagctctcttgtgaactaatgttgtaggaactcattagcatggggagggcaccaagccattcatgagggatctgccccatgaccccaaaaccttccactatgccttaccccaaacattggggattcaatctcagcatgagatttggagggaataaatatccaaattatatcagtgatcctcaaacaattatttgtttgagctatatgacgttgccaatatttgaccacctcacctatagaaatggcatttcatatagttcaacctgtaattacacaataaactatattaaaattgtgattagagctatgaacactctaaaacaagaggaaagaggccgggcatggtggcttacgcctataattccggcactttgggaggccaaggtgggtggatcacctgaggtcaggagttcaagaccagcctgactgatatagtggaaccccatctctactaaaatttaaaaaaaaaaaaaagcctggcatgtggtggcaggtgcctgtaatctcagctacttgggaggctgagacaggagaattgcttgaacccaggaggcagaggttgcattgagccaagatcatgccattgcagtccaacctaagaaacaaaagcgaaactctgtcaaaaaaaaacaaacaaaaaaaaaacaaacaaaaaaacaaaacaaacaagaaagaaagaaagaaagaaaaaactgacagagaagctgtttgtctggagcacaagacatgatagaggttggctcaagatgcatccatagcagagggcagggagatcaggcaggatctggcagaccaaggtaaagattttggatttaatcctgacataaagctgttaaagaaaatttccccaacattttgttatattttcaaaacatagaaaaaagttaaaagagttacacaatgaactcccaaatactcactctacctggattttacaactaacattttgctattatctgtcaagtcttccatctgtccatctatccacttatcttattttttgatccattttatagtaagtggcagtcataagtacattttaccccaaactctgcagcatgcgtgtcattaactatgtaatgttagtgacattacatagttaaagaacttaaagttccatatttgtacagtttgttaaggaacatgtgcatgacagaaagtcacaaattttaggtgtcttattcaatgagcattaaaagattttttttaaccagaggtgtaacttggctccagcttttgggtaattaatgtctggggatcatggggagatgggattgatgaaagaaatcagttgaggggctataaaactagtttagagggagaagatggtaagaaaatccagtggtggccattgggacagaaagaagaggatggatttaaaagatgttttagaggtaaaacagacagaccttgatgatgaatttgatttgggttgatgaggaacaggcagggtcaggtcgacttttggtttctgggtggatagtctgagatgagccagactttggtaatgggattgagaggagagtcatgagtgcaagtttggacatggaccctcaggtgcagactttagttagttagaaaacaactaaggccgggcagggtggctcatgcctgtaatcccagcactttgggaagccgaggtgagcagatcacttgagcccaggagttggagaccagcctgggcaacacagcgaaaccccatctctacaaaaaatacaaaaattagctgggcgtggtggcatgcacctgtagtcccagctactcaggaagctgaggtgggaggatcacctgatcccaggaatttgaggcttcagtgagccatgatgacgccatcacactccagcctaggcaagagagtgaaaccctgtctcaaaagaagaaagaaagaaagaaaaaaaaaaaaagaaacaaagaaaagaaaataactaacactgaactgcatgtggagttccccttgcccctcccatccttcatccttctctggattccacccttagttagcaaccaacttttccatatgcacacctaggggaccagaatacagagtgctgactcaccgtctgaggtcactaagcagctattttgggaacatctggaggctttgtctttccattttcagaaggaaaactgtaaacccaagaagccttagtggaggccagggcgcacatgctgggcaaactggctagagtgctcctgggcttcaggcaggtcctgaaatgtcaagcccactcctttctgtcacctagagcatccccaggggaatgtccagttaccggactctcacactcttcccattaggtcatctctaatgccaaaggggtgcctgacaaaaagacctcattggctactaggtgcttccaacttagccatcgttggaggattgtgggtttgaactggcggtccagacagaaactggctgacacccacagggaatgcattgttgccccatctcaggctttgagttccttgaggacatggatcactcatctccataccccacaaatgggcaggaaatgattgaggaaggaagaatgaagagaagatatcccactcatcagacatttgttatattccaggcaccaaactgagcacaggaacaaaaagatgcattagacacagaccttacctagttgcagagacaggaatgggagataagcatgaaaagggtatgcaaaacgcagaaagacaacaaacatctacaagatcaggaataaggttcccaggacaggtgacatttgaggtgggttttgacagaggacctgatagaactcaggcaaagggaggaatagaaactgcaacacagtggggtggaaaagaaagaggctgtgggttcacatcccagctctgcctttttatgttgggcaaatgaggtctttcgaaggaggttgctaactccagtctcataccggctgctgtaagcatgcagtaagataatatatgctctgggcagatcataataaaagctcatctttattgagttcttactggcttgtaccagaaactttctataattttctcatttattgcttacaacaccaagtatttgtcatatggggtatgatcttgtaaattaattcatttttcatgggaggaaactgagttaaggagatgagctaatttggtagaaatagtactttagccaggcaggatgatggcagaaacaaaatgattaaaggttatgttatagccccttcttgtcctcagagactcttcattgtttgtggatcttggacctttatgagaatcaatttctcccccagacaaacaaacaaaaaaatgcttattcattttgtttgtaaactcagggagtttttggaacccccaaagtctgttcacagactccacgtttataacccctctgacaccaaaccacccggccacactgtgcagaactcacttactccatgtggccaaggtgggaggagaaaaaaaaccagaagagcggctcagggaagatgcctccaccttgcccagactagtggcagttggaggctgccatagggggaaagcaggcactgagcaccctgccctggggaggaggaggaggatgcatcaatgacacaacagtcagggtaaggtgggatggccccgagccagagcggcacctcctaggcaccccgagcatcgctctgagtcagggtggcagtcactgaggccatcgttgcctgccaggaaagcacaagggagaagcccagcaggagccagagctgtctgcacatggcagcaacatcagagctcagcctgggctgtggggtggggtgacattggcacagctcagccatgtgtctgcaacccagaccagccctggcctggggaagcttggggagggcctggcagaactcccttccaagggaggaggttgcacaggacaggatcccaagaggcctgagatggggatgaagctgggccagggtgaggccacttccccacagccctggaaatgggaggtcccgggctaccttgggaggatgaattagcccacatcctgctagcggttgagggggttacattattctaccttctaatctagaaacgtttatagaggttatttttttcttgcaggggtttcaagtactcatgagtttattttttcaactttttaactttgaaatgaatatagactcatttcaacttgcaataatagcacatggagtcccttgaaccctttgcctagctccctccaatgatgacatcttatcattgtaatacaatataaaaaccagaagactgacatctgtaaaacactgttagctaggttacactccttatttagttatcaaatgtgtgtgaagctttaaataaatggcttgcatttacaggacctcatcttagtgctgttccacctcccaggcccatgaagtaaggctgatgttagtttgattgggaggcagagcaagagacagagaggggtcaggagagaagaatggagacacaagcagcagtcttttctgaggtcgaaattatggccatgccatgtggctcagacacagtcagacttgacctgacccctctgtgaaccatcgcagcacaggacacaggccaggtggcactcttggcacatacctgggagcttccgtgcctactttccttgcttattctatgcagtgggttgaatggtgcccctcaaaagacatgtccatgtcctaacccctagaacctatgaatgtgaccttacttagaaaaggggtctttgtagacgtaattgagttaaggatcttgaaatgagaacatcgtggattatccacatgagccttaaatacattgataagtgtccttataggagacatccagaggagagacacagacagaagaaaaggccacgtgaagacagaggcagattggagtgctgcagccacaagtatgtggacaccaccagtagctggaagaagaaagcaggaatcctctcctagaacttccagggagagtagggccgagctcacaccacaatttcaggcttctttcctccagaactatcggagaataaaattctgctgttttaagccaagtttgtggtcatttgttatggcagccctaggaaaccaacatattctataatgcaaacggcccctctgcacagcccttgcctttcatagagcaggtagacagacattactggtttgtaaccactaacaaatggtcctcaggaatcaaggcagaacagttgatgccagttcaccaacaaggaaagctgggcacagagcactctgctgacctgcccaaggatgcaaagcttaggtggttgagcagtgactcaaacccatcttttgcttatgcccaagcctcattaagatccttgctaagatcatccagggccattctgagggacagttggttgcctgttgtagcatgtttttgttctagagttcaatctctttatttttaaaaattgccaactggcaaatgtcagcatctcaaagaagggcattgaccaggtacttggttatcttttcatgtgcccctgcctccatctgagacaaggggtaaagggaatcaccgagaaggtgggcagggccaccccccacacagcaagccctagggaaggaaggtggagtctggatccccacgaatgtccagtggaacatccactgccttctgctgcagctgtgggcagctgctgttccctggcaggccccaaaagggccccctgaaagccaagttctcagccaaccagtcccctctgtgcttctgaagactaacgcaggtcaagttatccccacagtcctaacctggtctgccagagcatcttccccctacacactttcccttggagtccagtactttatttttatttttatttttgaaaaggtattacatatacatgggaggaaaaaaaaatcaaaacatcatctccctcccactcagaacatgagttcctgaattctccttcccagaaataacaactattaccagttacttgggtttccttccaggcagaagcatgtagagctaaacatgtccttcttttatacaaatgagaggaccctgtgtgcatcattctgcgccttttcccatttgatatagcttgaagatttcccccaaacagtacacattcttgataacagcttccacagtattgccttgcataaataaactgaaatttctttcatctgccgcctgtaaagcaacacttagggtgtttctaatatgttctcaccataagcagtgctgtgatgcatagcttgtacactcatatttgtatttttagtagagacaggtatgtctctacttcacacatatgtaaaagtgtctccataagatcaattcctgaaagaaaatttgttgcctcaatggatacatgcattttaaaatttaatggaaactgtaaaattgccctccaaatggcttgtaggaatttatcgagccagccagcagtcagtatctgtttccttgcaattgtaccctaatgatgtgtgatcaaatcttttgtctttgcaaatcagctaagtagcaataaacatatgagtgctatgaaggatctggtgatgtgataggaatgtgtacatatgagtatgtatgtagaaatcattgagctgcacacttagaattagagtacctaaggaactttatgcatgctgtacctcaataaaaagaaaaatgaggccggatgcagtggctcacgcctgtaataccagcgtttgggaggccgaggtgggtggatcacctgaggtcaggagttcgagaccagcctggccaacatggtgaaaccctgtctctacaaaaaatgcaaaaattagctgggcctggtggcaggcacctttaatgccagctacttgggaggctgaggcagggagaatttcttgaacctgggaggcagaggttgcaatgagccacgattgcgccattgcactccagcctgggcaacagagcgagagactgttacaaaaaaaaaaaaagaaacaatatgaagaaaacaggatgctgagattcaagaataagagggtcccttccttacactgggcggtcttgaagtgcctcacttgcaaccttaggagcaatgagactcccacaaaggagtatctggaacccatgtgaaagaaggtttcagatacaaggaagagcactgacaatggacagggaaggaggcagacttgcttgaggaagtgaaaacagcaagctagggggactggtcccagatgaggctggaaaggttatcagagtccagatcaaacagagcctcttaggcaagaagttggggttattttctcatagaaatgggaaaccattgaaaggatttaagcacatgagtgacaggatccagccagttttgttgttttgttttttaatcacacagctgcctggagagtggattttaggagggaaagaatggaagagcagagacaaattagaagtctgctgtgtttttttaagctgagagatgatagtggcttggatcaggatgatgataaaaataggcagaggtggaaagattatgtatatatttaggaggaatgatctatgagacatctatcctgatcaagagacggtcagctttctggctgggcctagtgggtgggtcatggtgccattgtaccaaaagtgaagaaggcttaggtaggtttagattgaggtcatagggagaaaaatcaaaagtctggctttaatcatattaagttgtagaggtctaagaggcaagagacatcaaaatggaatcacccagaggagagtaattggtgggctgtgaaatgaaatgtctgtgtttacgtgcacttgcacagagacccaaactaccatcacccctgctttaggccgaaatttcacagaattgtgggcaatgtctgtctatagccatgagatcagaacaactctgtttcatggggatagtatttttctccacagtttgactctaggctcttcaagagcagagactgaatgttaaatctcctaaaccctcaggaccatagcatatgctccccaaacaggtaagtggctgagttgagggctcatcacagatttagctcatgggatctcaaatgaaagcagttacctgagctcagatcagtatccactaggagaagcatgggcctggccgttggcaagcggacagaagaaagcccaattccccaacccactggattcaaaagaccccacgggcattgcttccagcatccaaatgagcaaatccagaagtcattgttaatggtgctgggcctggtgccacctttgtcaaatggagactgcgaaaggttcaggaaatcccacagaacgcctaatccctcttttttgggggaaaaactgctactatcaacccatctgtcccatagcaaatgtgccatcaaaaaagccaataagactcccaaacttggcttattttatctgtccccaaaactagccattacctctgtcccacagtctccaagtttagtccttccaagctgtcctctgcagggccgctaacatgcaaatcttaacatcctgcctcccttcttaaaactccttgatggttcctgttgtctttaaggtagagcccaaaccagtcacacatatcttttacgatctggcctctaacaacttttccactcatacaccctgacttctagactaatacaccttctctctgttccccgagcatgctacaacctcatttctcaattctttgcttgaaagagctagttaatatttaaaagaaaataatatggggagatgctaagttcttggggaacacagattaaaatgggataatcttttccagttataaattggtaaaaattgttgaagatttaaaatactcagtggttagagagggggaagaagctgttttttttgttattttttatgttttcgagatggagtcttgctctgtcacccaggctggaatgcaatagtgtgatctcagctcactgcaatctccacctcccggattcaagtgattctcctgcctcagcttcctgagtagctgggattataggcacacaccaccaggcctggctaatttttgtattattagtagagacagggtttcaccacgttgatcaggctggtctcgaactcttgacctcgtgatccacccacctcaggcctcccaaaatgctgggattacaggcgtgagccaccaaatctggccaaagccgtttattaatctgttggtaaacacataagttatgtcacatttaaagtcctgcacacatttaaaaggcagatgtgctttcaccccagccaccaaacttccagaattcttgtccatcagactacttggacaaatatatacataaaacatgtttactccagccttatttgtcatagcaaaaataggagacaatttaaaggctccaaaaaacagagcagctaagtcacttatggcacatcctaagtggtgaattctaagaagttgttaaaaagaatgaggtgaagtcatatgaaatgatttggagggatgtgtatgttattttgttaaggctgaaaaaatagctgtaaaatcagattatatgatccagtttttggcaaaaaaaaaaaaaaaaaaaaaaaaaaaaaaacaagaaaagaatgaagagagaaatctagtatgcacatcatttctctcgtggcagttcccctgggcagtgggagtggggaatgatgagcaaataggaaagactttcatattttactttgtacattgctatataattaacatattttcttcacaaacatgcactccttttgaaattaaaagaagatatatataataaataataattaataaaaatttttaaagagccacaggacaatgagttagcaagggcaattgctgctgatagttgaagaagaatcaagcctcgaagaacatggaagaatgttccccaagatctgaaaggaggtggtttaggaggtagaagtaagaagagggaggccatttgcacatagaccccaaattcaaagcaggcttcagagcagacacttccagggccttatttgtgcaaagtggcagctgggagaccatgttataagaactgactgagatcagaaggtgaacagcatgtgagcccctgtgaggatcactcaggaccgctgatctcctaggaccagttgtctggccattgctgagagccatcagctctgtacctggcgccctgctggggccaacccttgtctctgttcacatgacctggtgggagcatccaccagaaacaaatgtaagacgaatatctcaagagagaaatgattctaaaggaagagaggctagagctagttcagacctcagctagtatgctgtctggacctcatatatcctttgtcctgccctcagttctcatgcctgagtcctgagccaagggggtgtgtgaagaattagaatgaatggggtgctggtcacattctttgtcttgatctgggtgctggtcgcataggtatattcagtttgagaaaattcaacaacagctgtacacgtaggatgtgtgcacatatgcatactatagtcaataaaaattattaataaaattaaatgtccctcaatctccactgtatcatttttcttaaaaagatatagcagataaggagggagggttctttggaccttaggagagcaaaatgagaggactcttttgtttacttgggcatctcaggggtcatagccttcctcccagcatgagtggagcccacagtgatggtggtgcccatgagctctattgtaaacacctagacagggttacggatgtagccatagctagagatacagatttatgcacctgggaattttactcatatgtttgatgttaacagaaaaattcctgaaaggacgcaaactaaactaaggacagtggttacctgggtgagtcattcctactttttttttttttttttgagacagagtcttgctctgtcacccaggctggagtgcaatggtgcaatctcagctcactgcaacctccgcctcccaggttcatgccattctccttcctcagcctccggagtagctgggattataggcgcctgccaccatgccctgctaatttttgtatttttagtaaagacagggtttcaccatgttggtcaggctggtcttgaactcttgacctcaagcaatccaccctcctcagcctcccaaggtgttgggattacaggcgtgagccaccacgcccggcctcgttcttactttttgtatcatttatttcttcattatttgattattcctacaaaaaatgtatttttaattacaacttattaaggtcttttctcctcttgcttgttgacaaaactttagacatccttgaaggtgcaatcttttccccatgacactttctctgacttctttgtacaggttttctcaaagttttgtcctcccaccctgactacttgtcctagaatcacctggggagatagttgaatttgtagatttatgaccctcttcccagactggctgaagtataatatctggagctcatgaatctacattttaaggcaattttgttgctcattgtagttgatcatctttgggttagatgacgaattcctttcttttctaggcattcagacctccttaacatctgcattctgtggcccagggtttattgatcccaggactgtcttctccatgagactgcagcccctcaagggcagtgactatatccaattcaactaactttcctcagggtttgacataggacccatgacaagagatgttcaataaatatgtgctgaatgaatgaatgaatgaatgaatcttcatcatcacacaatcactggggtcccaaggatgagacttgcatggtgggccagtgcagatacagagctgggcttggttcaggtacatttttgccactctgaggaactccagcttgtgatcccaggctatccttagtagagaggagccaggattggtgagataatagggaaacttcaaaagccagtgaaaccagccagaggagccacccagtaacccagattatgggattcagtttctatacattaggctatctcaccattaacattaaaagagctgtggcataaatcacaagcagcatggttccaaagattaaggacccctcttaccagcaaattcaaggtcccttaagagtatagaacagtaatctcaagctcgcactgcaaagccagtgacctgggttcaattccttattcaacttgttaactatgttttgggcttgtttcccctatgattctcagttgtcccatctataagctgagaaaaatactattgcttaactccaagagttgttgcatcaggttagatcatccatgcaacaaatattccttacactcctactgtgtacccatgcccggtactgttccaagtgccagggagttaacagtaaagaaagcaagcacaaaaccctgtcttgagggttaattcatgtaaagcagagtccgtagcacagagtcattgcttcaggtggtcaaaggagactctttatatccagacctgatggaccttaaagagcaatctctaagctggctgtcagttcctgcatctagaaattaagacacgcaaggaaggtagcaaaagtcatccccagatcctgtgcaatggtcaaagaggtatagtaaatggctaataaatagaagctgtgaaaattgcaactgtaatacccaacttgccctgggggagcacagaggcagaggcagtgcctcttagggccctgaagcccagacaggagctgtgtaaacaaagcgcttcaggaggaaaggatgccaaaatgtgtccccagccacagagtggctcagcagactcccccggctccaattcttggaaataagtagctccttttttccagaagaaaataaacttaaacaggaaagtgcttcatgattcagtgggttactcggggccctggaagtgtgagtgtgcctgaagacgtcggcagtggtttacggagcaccccagcattggggaagaagcccagtttcctgaaagtgagcatggcctgagtctgtgtctgtttatgcccatgtccctggtacagtgcatgctaacacgtgcctctgtacatttgtatagtgggtgcacatgtgtccaggtgtgtgtgtgagtgtgtgtgctcccatgcaggttggtgggaatatgtgcctgtatgtggctttgcctctgctcctgaggacctgggtttataatttccacacacatttctctgtgtgtgtgtgtgtgtgtgtgtgctgtatgcacctgtatttgcttgtgtctatgtctgtgtgcttggataactgcaggcatgcttttgtgatgagcagaagaggagagagaaagcaaagacagtgaggaaaagacctgagccaggagaggatggggttcaaagcctgcggagaagtgtggagtaggtgctgagtcctcttgagagatttctgtcagggatgtggtgaggaaacagacccagagtgccccaccacagcctccaggaatgggttctgggttctctctgatctggtggctgctctgatgtcagggtataaggtggctctgtgggcatacaacagcccagcaagatctccaaggggctcctccacagccccacccaggggatctggcccatcaagtggcacacattaagacttttagtaaaggggaatcatgagcccccactgtcagccccggactgtgggaattatgactttccaacaggaggggaatgaaggctgctcccagcttctgggcactgctaggagatcctgggaaagaataacctgtgagtccagcccacaccctgggccttcactgtccctcaccagccggagaagctccgtggctgacacggcggatcgctaatatcccctactcaccccaggagagctgggcccaggcttcacagaagagaatgagttattcacatagggaaatgacaccaccagaggtgctgccatcagtggggtgcctcttgggaacttaggcattaagctaaagacagtgacagggtcagcgctagtggggcaaggaccagtgaggtgaaaaagaacagtttcctaaagaatgtgcagacatttcaggactctcgcctctaggaaaacagagagcttccacgttttgggaaattttcatcaaagaatattttctttctatctggtagtgcaattaccccgggcttgtcccccaagctgagagggcctggcctcgcagtttacaaagacaatcgccctggacaccagattccgcagtcctgggggctataagtagcttgtgcagtggcctccacttcctcatgtcagttttctctgagattttcctgatcctctagctgaccacacccactccaaccaagcacacagagcttccagagaagtctgccctgtcttcagttcccaagctcaggcatgtgcaaatgaggcccactcctaagcaaatggctgtcccaccccattctgggtctttcttatgggattcaccctcagtgtctagtcttagtggtaaaggatagagtagaggctcaaatttctagctgggattgtaaaaaactgcctacctgcctatccacaaaaagacacattcaacatgtaagaggtgaggaccaagactctgtcttctccagaaacactctcagacctgctagtgagaagccagctgggacaggctgcactgatccctctccctgacacctcagtcctatcagcaatcctccgtcccatcctcaaccaaggtaccacttttttcctgaatggcaaattccattttagaaccctgggaagtcctacatgtgtctgcctaggactcaaagctcaaatagaattggaactcaagaccggctataaatggtccagggtttccattccctctgcatttgaacccttctagagaacacctttagagagagctgaagctagggacatagtcattatactctcactgaataccaattgccgtcatcaggaaaagagacagagagaccgctgtgccctggcactgagaccagagaagggtagtgagcatgaattatgtattacacaagcaatagagataagagtggaatggggggaaatcataaccctattaataatggaagtgcagtttgtaaactctccaccaggaataatttgcattgcaatataaacagggagtagaacacagagcagctggcaatggcgtttcagtaaaatgtaaaagccaccatttcgaacattaaaagtcatgattaaattataagaatttgttcagcagcgtgtacaaggagagggcacgcgctccgactccatctgagcacagggtcagcccttcctccacatgtcttctaggagcatgaaccaaggacttgcttgggtccttgagaccttgccaattcctatattattattactagtatttgttgttgttgagtgcctgctatgtgcaccactgtaagcgtgttgtgtgcaataacagttaatttttgaagcaacactatgagggaggtcctataacatctccattttataaatgaaaaaaacagaggctaaatggtttgccttaggctgcaaaattgctaagctggaggtgttgcggtgcaaacccggacagtctgagctcccagcccaccctcctcaacactatgccctggtatctcttcgggagctgctcaggtgtccctttaggcacctctgaaacggtgctggtgggatggaaaattggaaccaaccttttaaaaaatgacttggtagtatattaggaacttgatcaacctgtgaccaagttgttcttcatttctaggagtctcctgaaaagaacttaaaagcattatgatctctgatagctactgaggtataataattattagatattgatgtataaaagctctgggtacaaacatgggttttattaccacattatcatgtgaaaaaattagaaataaccaaaatgtctgatattcattgaattgttaaacaataataggctgggcgcgatggctcacgcctgtaatcccagcactttgggaggtcgaggcgggcagatcacgaggtcaggagattgagaccatcttggctaacatggtgaaaccccatctctactaaaaaataccaaaaattagctgggtgcggtggcgggcgcctgtagtcccagctactcgggaggcggaggcaggagaatggcgtgaacccgggaggcggagcttgcagtgagccgagatggcgccactgcactccagcctgggcaacagagcgagattccatctcaaaaaaaaaaacaaaacaaaaaaacccaataataatgcataaatattatgcatccaaaaggggaattgttgataaagaacttacaataacaagaaatgtgcttgttaagttaaacaagtacgatataaaaggatagactctctatgagctccactgagtaaaacaatatatagagaactgtgggcatgtagctacaaggttactaatgttcctctgtgtgtcaaaaagtatacatgtttccttttctattttctgcattttccaagcatatattaattacttttacaatcttaaaaattatatagatagatatagatatgttgatacagacatattgattgattcattctgttacttagtatatgtaaatttgaaggtgccctcaccatctcaattgtaaacaattatagacaccaaacagaatgagaacagccctctttgtccccagcttgtcatccctgtcctcaaagtcctgtaggtcccactatccaaggagttcccctcactctctattgagtgcctccctcactaagccatcggctcagaactgcctggagcagaagactgggactggaacactgtcctccacacaacataaagagtgccccatgtgtcacgcacttttctctatggtttctataagcatcagacataggggaaagcacctccatctatgtctgtggatctagaacccgacaaccccatgcttgctcccaggaaaatcaggcgaagctgggagtgcctgccctcatggtgaattcgataaggcactggtctatgagacactcctggctctatactgaccacctggctgtgtgatctcaggtaagtcacctgagctgcagctgacccttccataaaatgggaatgtttgacttgagcatgcgaaggctcttttcctgccatgagagtgtacacacataaggtcacatgagtttgagacaaatctaaatgggaactatttcaaggctgttgtcgagcattccagtgcatggtaacataaaggcccagctgccttgccagttcagaggctggcagcagagaaagtgagggcagtggagttagaacaaggcggcatgaacatgtggctggagtgagctttgggcagggtggccgggctcctggcctcccttattggccagagtgttgtcatctggaatacaggcagatggactttgtcacaaacagatgatatcccatccaatgacctgtaagagtcttaatgctgaacaccctggcaatgggcagaccatggctcctcctggaggatgatggaagcagggaagataactggattctccaagatgggagtagcattcaagaagtgggatgtcacaagactggggacctagaagccccaaaactgccaggaggctgagaggctctgagcccaggttgggaagggagcagacagcaaactatactccccagtgttctcagcacattattgacattccagagaggagaggcagagaattaatttcatgatgacttcctcccccaatacccatccctctcccctgcccacacaatccccagctaagtccaaatgagggcctgagacttgcaggaagacaaatgatcccaatttaaaaaatgctccagaggcctccatattccattccttcatttgttcctccccagtgtcccacaagaggctgcagatcctaatcctgggcacagtggcagtggcatgcagttggtgctcagtaaatgcctgttggctctgaaccaaatatcttcaaactgccctgtgagacatcactttcccagaggggaggacgagcatttagcattaacttggttcttattctgcaaagcgatcccagtttccactgcctctgcctgtgaaagtctccctactgccagtgtcccaggggctcacagtggcaggaggcctgggggctttctcacagctgcctttaacatttccttctggttatgccccgctgctctggtgactgatgctatttgtcagtcaccacccaggggagtcatggagaaagattgcccaggtgcctgtcacaatccagatacagccataggtgctgacaccttgtcactgtgtcaccccgacctggtcttattggcctttacatgttgcttcccaaagagacatcaggagatgtcagaggctaagtgggggcggggtggtccctggatcccagactcacctccctatatctgcagcagaaaggtagtcacagaaatgcaggaaggaaagaacacagcctttgtggagcctggaaaattctgggctcttggggcaatgagggaaactgaggaaggagaaaatgtcaggaagcagggtctgcccaagatggggcacagaatcacacagaattcgcctttcaagatctgattataagaaaataatcaagcacagggactacgacttatgtccaaagatgggcattttactgccatgcctaagagtaggaaaattagaaatgcctctgcttggccgggcgcagtggctcacgcctgtaatcccagcactttgggaggccgaggcgggcggatcacaaggtcaggagatcgagatcatcctggctaacatggtgaaaccccgtatctactaaaaaacagaaaaaaattagccaggcgtggtggcgggcgcctgtagtcccagctactcgggaggctgaggcaggagaatggcgtgaaccctggaggcggagcttgcagtgagccgagatcgcgccactgcactccagcctgggcgacagagtgagactccgtctcaaaaaaaaaaaaaaaatagaaagaaatgcctctgtttactgtgctaccctgggcaagacacttcactatctaagcctcagttgcatcagctgcgaaatgggaaaaacagtaatactttatgaatttgctgcaaagattaaatgagataatgcacagaaagtgctttgcatagtacttgccatagagtaaattttcaattttagtaaatagcatttagtaaatagccagtagcaagtagccgttactaaaattgcatccaaaaataatttatcagttacacaaatggtgacatgccaaaaaatagtgtgaaatactaagcaattgaaagcaggtttccttccaaagagatttacagtgaaggggaccaagcttatggtataatttataataatatgtatctatgtttttcctataaaatgtgcatatttatagtgaggagtgaacttaattttttattggaactttattggaacttttttttaatctatgtccaaatttcactagtggggacaggaaattcttggctgaatataggaggggtccaggaagccagatggaattaaggaggctgtttcccctaagcagatgaaatcctgctctgaaaaatatttcctggttatcccacactgatttagtctgttcatgtgcatgtgtatgtaggtggttgtgattgtgtgtttgtgtgtatgttgtgtggatgtgtgcatttgtgagtttctgtgtggttgggtatatatgcatgtgtgtttgtatgtgtgtctgtttgtgtacgtgtgtgtgtctgtgttcatgtgtgtgtttgcgtatgtgtcccttgctgcatatgcattccctagagcagtgtttccagattgttcaaaatgcagattctaaacatagacacctgaccagagcagggagtatcctgaactctgaatatgtgtcagttttttagggattcatatgcacagcatatgaagagtttggtaactctaaagacaggtatcttaccctgttcacttcaaatcaccagtgcctggcataggacctagtatataagaggtccaacaaatggttattgaatgaatgaatcagtcaaccaatcaatcagttaaccaattcatatcttcccaactttgaggaaaatacacatatcctgaactgtactagaatgtgagttccctaaggatgggaaccatgaacatagattttcaataaacttggtgaattaattagttttccctaatatcgatgtaaaggaaggctcttcttttcctagaaagactgtctttcttaacagagctcatggtcacaggggaaacacagaggagcagaaaagactcttaacagtgtccactcatgccagcacatggtctgtctgtaggagtatgggtacaaatgaaaagtggtgacaaatattactcttacagcaaaagactgaataagaacaaaactagaaattgtagctgcagccacctctcaaatctatatgatttttcagagctatcaagtttctttatcccatttgatccaagacaatggagtgagtcccactttgacagataaaaagataaagtgactcaaccaagtttcttcagctcctcaggggtatcaccaggccaagaatcctggttgtcaagtcgagcttcattttcaggattctttgttagtataatgatgaagactgtaattttcctttgtttcgcctcctcagctcaactataagcagatcccgacttcaggaagcatccagctaaatgagttggatgtgtccctccaaaggtttaagcaatgaattattatttcacaggtgcctctgattcaccagctctgaatagctggactggtttggcttgtttacacgcaaatgcaaaagccattagggagccccagttccaacactgcagattttgttctaagtaccaacatcccaaaatgctctccattacttatctggaatttcaaaatcatgcaacaaatgtaagttacagacaagattttttaaaaaataataacagcaatgccagagaggaaaacagaaaaaaagaaagacaatatttttcaaatattttcccaactgtcattttaataatggcctatcaacaaagtatgctaatttccctccacagatacctgcgaatgcaaatgcaaaacaaataataattaatgtctctgtgtgaaaatcaagcaatttctattaattctgcatcagacatgagattatgcacattcaaaatcatgatctgttttcaacagcaacagtgacaattgtaaagaagaaatggtgaggggaggctctggagttaacagaatccacatagccatccttgatatgacctctcccagcttcccaacaaaatacagtcagctcttcatatccacagatgcaaccaaccacagacgaaaaatattcaaaaggaaaaaataaaaacaacaataaaaaataaaacacatttaaaagtacagtataacaactattatatttacataataccttacattaggtattataagtaatctacagatgatttaaagtatattaggggatgggcttatgttatatgcaaatactaatatgccattttatgtaagggacttcaatatccacagattttggtatctgtggggttcctgaaaccaattccccacagataccaagggacaactatatatacgaacactcttggaactaagaagagtaatcaaccaagtgtcaaattataagcaaaagttttactagctatagcataaaaggaaactgataaaaaataatattcttgatggtgagtactgacatctgaaccagagtatcaaggctggaaggcactgttgagccctagctcacaagcagagactccagatctttgctgattaaaaaagcagacaccctcctctctggtatgctccaagagcttcctaaacccatcctccctgaaactaccaagaatggtcttctttttttttttctttatttcaaaaaaaaaaaaaaaattggatacctattgacccgtcctctaagttccctcccctcacccctcaccctccatgccccaacaggccctggtgtgtgttgtttccttctgtgtccatggaaaaccaaacactgcatgttctcactcataagtgggagatgaacaggaatggttttctacttcagtttatagactatcatctgactgcaatgtcacatggagggaagtggaagagatccaagatgggatatgatgctggcattaggcaaagtcataaaaggaggcctggaagctatgcttcttagaggttgtgaggtttcagatattatttctaccaaagggtagagagaagactatctcagaatgtccagaaataaatgatctgtttcacactcaaagaatcagggaacaaaagatctcacaacagtccagcaaagtacattgtagtcaatgcatgaaggaaaatagaaacccatccacagctatgctgtccaacataacaggcactacttatatgtggctatttaaatttaaattaattaaaattaaatacaattaaagattcaattcctaagttcataatcacatttccaggactcagtagccacatgtagctagtggctagcatattggacaacatagatagggaatgtttccattgtcatagaaacttctattggatagctctgatctagagcctgaaaagcctgaaaacataaactccaagtgacagatatctttcacttattcatcctcccctactctatcccatgctcccagaaggcagacctctatggcatatggtaaaggacttcttgttctttttttttttccaactaacttttattttaagttcagggggtacatgtgcgggtttgttacatgagtaaattgcatgttgtgggggtttggcatacagataattttgtcatctaggtaatgagcatgatactcaataggtagtttttcagtcctctcccctctcaccctccaccttcaagtaggccccagggtctactgttcccttctttgtgtccatgtgtactcaatgtttagctcccacttataagtgagaacatgcagccaatactgtatatttggtattctgttcctgcattaatttgcctaggataacggcctctagctgcatccatgttgctgcaaaaggcatgattttgttcctttttatggcagtatagtattccatggtgtatgtgtaccacattttctttatccaaaacaccactgaagcacacctaggctgaaggaattcttgttctttggtctctggttgacttcagcgataggagggcactagaatgacactataggaccagagagtgaagtgaggcctttgttgctttggtttctgacttcctccctactggtcattgtgatttagatgtccctctgttaaaagctgtcactcttggcaggcagctttccatataactattctctgggctctggtaacatttccctcctcctcttgatccttcaggctgagggtaggtaaaaatgcctcacaagcgactcgacttggggcactgcatcatcccttttttgttttttgtttttttgtttttttgagacaagaagtttcatttttgttacccaagctagagtgcaatggcatgatctccgctcgctgcaacctccgcctcccgggttcgagcaattctcctgcctcagtatcccaagtagctgagattgcaggtgcccaccaccatgccagactaattttttgtatttttagtggaaatggggtttcaccatgttggtcagactggtctcaaactcctgacctcaggagatccacccaccttggcctcccaaagtgctgggaatacaggcatgagacactgcgcccggcctgtgttatccctttttagagctcctaaactcctcccacaccctgggaaatgatcccttaataaatcttttgtcaactacctactatgaggatgttatgtttcccctgagtgagtaccctgatgggtcagattctgctctaacttaagtctgaggaaatgactttatcaaaatctacagagaccgcagaatctatagtcccctggggcagaccatggatttagaaatatgtctttccatttaacaatgattaaacaaaggaaaatagcacaggagttagcaaatgtttttcacgaaagcccagagagtaatattttgggttttggaagctatacagtctctgttgtaattacactgcagtgtaaaagcatgtagccatagacaatatataaatgaatgagtgggtctgtgttctaataatttcatttacaaagacaaggaataggttggatttggtccatggactgtactttgcctaaagatgccaaaaaatgcatgcctctgaatttatttactataaaaagaagaaaatatatatatatatatatgtacgtgagtgtgtgagtatgtgtgtgtgtgtgcacgtgtgtgtgtagttctctataaactgcaagaatgtatggcttctaggaagagaaggagataaaaaatgaaacaaaatgcaaaagcaaaatgcaggctaaggtgaagaaaagtcttgctgagatatcaaagaaggcagagaaacaattaatacactcttagaattatagtttacattagaagcaataaagagcagaacttatactgcagaaaactaagtttcagagaaataataaatttgaaacatatcttttagaatctggagttgaaaataatgagcaaacagatggcatatatgaagaatagagaaaagtgatccaatttacaaaaagaaaatagtgttcctttaaaaagtctctaaaaaagtaatgacactgaaacaccaatcaaatctatattagaacattcttgaactgaaaataaaagatctaaaattgcaaaacaaaatggtatactctgcacaaatcataattgatttaaaaaaaaaaagaaacccacagcttgatagcaaggaaaaaataacttataagtatcccaggcagaaaacaaagcaaagcaaaaataataaaaaccacattgtttgcaaaagattaaaaagaaaaaaaatcagattgggttgacctcagaactctccttgatgaaaaattaaaaataaacataatggctcacaatgtggaaatggttaggtgtacttacagtacaaccagatgttagaatattatgcaactatcaaaaacaatatagtattaagacaaatataataacaaatatagtattaaaagaaaaacaatataagtatcttccaatctcattaaaagattggaaaatacttaggataaaatatttagaaagaaagttagacacaagaacatatataatatgcatgtatgtgtactaacacatctactgtatttctttctagccttttgtctacctgtatatgcaagtagaaaaatactgagtattatttgcacatcctgcaccactcaatagtttaattctcccaatatatctatgaaatagtaacaatatatcccacagcacacttaagaacactgagggttggagaggtcacgaacttgtccagatcatccatagttggtggcataaccaagattccaatcaaaatctaaaatgaatatgtttcccttatgctagcttaatgagggtggtggctgcgctctgtgggaggggaggagataggaaggatgaatctgggtcctgagagaggataaggccctgggtcttggtgctatcagcagtagttaggctggacagatgggaccagttttcctttacccagcatagctctgagatgtcccttcagaatgtcagcagtgacccatctccctctggccatgatctcacctctggggagcctggaagaaccaacagaattcaacagaaaccccagggctggctaacttgaaggatgactgatgttttaccaatttatcaaaatatgaatttaatgttgtaatctccttacatcactatgataattctctgtttatagttagaaaaaccttaggaggaatactactatctcctcttccagaagaacagatcaggagcaaagctacaaagattgtacacagttctgaaatatttacttcttctgaaggaacattttataaagtcaaatttctgtgctgggcttgctgatggacttaagtctttgggcagttttacagacaaagcagccaaaacgaaaaaagaaaaaaaagtaaaagaaaagataaaaagaggatacctttctccaaaaggtggtcagtagagaagggtgtatttgttcaggactttcaagttctttatgaagtgagagactttgctcatttgttaattgatgcattcattcacccgaaacatctttatgaagcatgagccgcagagttggactcacagaataagaagaagtatcaaaacattgctcctgtttccaggaacccacagtctggaaaggcatgggtgggggtgtttaaaaaggaaagagagtcacataacccattgtgtggtttagaaagcccattctgtgaaataagcaagtggtagaaccaacatatattgcaaaaccatttatttgaatacaaacaaaacacatccaaagtaatgctatataaatatgtaaacatataaagacatcaactaaatatgttatcacatttatgattctggttgcctttggggaaggaaaaagaattagaagaattagaatgcaggtgacttcccgtttatctttaaaaatgtctttcttaaaaagaaggttcaaaataaacacaacacaaaaaaaacacacattgtatgactgtatttttgtaaagttcacaaataggcaaactaatctatgctattggactcaggatagtggttacctgtgatcaggtagggtgggggaataacaagaaatgggcaaaaggagaggcgggtaatgttccttttctttttgtggtacagttatatgactgttcactttgtgaacattcaacagatgtacattaagatatatgtacttttccatatgggtgttatttcaataaagatagattagatagatagatagatagatagacgatagatgatagatagatagatagatagatagatagatagatagatgatagatagataatagaaagaatagaggaaaagcatctgttgatttggagtagcaaatatatggatattagctataatatctctgcacttttctatatttttaaatgttttttcctaattatgtaaataataaaaacatagaaaagacaactctagctgccctatagagaagttagagagtggagtaggcagaccagctaggaagttattgcaggagctcaagttagaaaagatgggactggagggccaggtacggtggctcacacctgtaatcccagcactttgggaggccaaggtgggcagatcacgaggtcaggagatcgagaccatcctggctaatacggtgaaaccccatctctactaaaaatacaaaaattagctggctgtggtggcgggcgcctgtaatcccaactactcaggaggctgagggaggaggatcgcttgaacccaggaggcggaggttgcaagtgagccgagattgcgccattgcactccagcctggcaacagagcaagactccatctcaaaaaaaaaaaaagcaggggagaagataatggtgaatttacaaggtctggtgaccatgggttatcccttcggttgctctgtggactttgagcaatccatctgtgtgattaaccccacacaccaaggtctcagtcacccttgaacatgggaagaacccctcatcatctgcagggtgagatgtgttttgccctgaaatccccttccccagtgcctccccttagcctgccctcctctgatcctgaacccccagccaaggactcccccagagccctttaattggcttaaacactagacaggagattccctggcaggggtaatccatgattgaactagggataatcagcatgattcatttgtctgattaaaagctctcactccccattatcacctacctgagaggaagccacacagggctctgacagcaggtaggcaaaggctcagggcctgacactgtggcggggtggggaggggggcagagtagaaagtgattgaatgacacagggcacaaagctcacagcagcacttgtccaaaaggaactatagaaacaaaggaatgggaaggccggtactcacaacatggaaaatatccacctggtggggctctgtgggaccatgcacatcccgcagaaatgcctgtgatttggggacgtttttcctttgatcctcatagataaagggtttctgcttccccgcctcagaaaggagcagtttgtgtctgagcacttgctattcctctcttcattccctcactccttccattctgtgagaggagaaatgattggtctgactggtgagtgaaaagagttttccattcactgcaccatatttgccagggcagagttgccattctgaatcatgaggtttcctctcaatctctctgtcctctattcttttggacattgctattctcagagggagcccactttttggcatcctctatgtggtcaggtcatgagggcagctacctgccttttgcagaccaaaagggcctgtgttctctttgcttcactttcttcgcatgcaacaggttgaagaaactcagccatcctagtactagaggcctggggagagaaaaagcaaacccccttttgccgaatgttccctgtaatagattgtattattgttcctattctttatgtcttcctgtacctttatcttctgcctgtgcctttggcatactccccaccaaaggaggggtatatttacctgcaggtcagttgacatagtctgggctttaatccatgctacaggttgggtccacctctgcctcacacatctctccgtctccacagatcagtgggccagttccatgcaggctcttcccatggaaatggtaggagagcagaagcttatgagtggagacatgagtttgttcataggatttgctttggccaaagtaatgtgggtagaagtaactatgtgaactgtgtgctggattcaagcctgggtattagaagacatcacatgtctccactcacaagcttctgctctgcttctgccatttccatgggaagagcccgcataaactggcccactgatctgtggagaaggagagatgtgtgaggcagaattggacccaacctgtagcatggattcaagtccagcctatgtcaactgacctgcaggtagataagtgagaataaacgctgcttcaggacactgggttttggtgtgattccttgtgcagcattattgtaacaagagctagctgatacaccccatcatccctggttctccaggtcagtaaagaaaactatcactctaggttataatgctaatattttgcccagtttggctgaatgctttgggtttttactttatcgatcaagccgatggagaaaagtttcaataagtgggaggagtagagcacaaagtctagggtaatcatatgtcccaatgggcctggatggccctaatttatacctgttatgccaatataattaataatagcacccttctgtccaaaagtacatcctggtttggatgattaaattatatcaccctagccaagcccaacaagatccagcctaaaccatgtcttccttacactaacaatgggcacccctttgtggtcagtagataccccagaattttttaaaaagccatgtcctggaaggcaggaggcctggacagcaattctcatggcagcaggtgaggtaaaaataatacttttcctaaatgcagtctatctgcacaagattttataaaagtgctatggggtattttctgagaaataaactccttaatatgacttcatggtaagagttctatttcctttattctcaggagtcctagggaagaaaaatatgccccctggcagtgttccataaaactaatgatgtgggggaatacgtgaataattgcctgaatcgccgggttacatatctgttaggaaatctcttggcaatataaagaaggggctcaggacagttaaattgaagtcaagtgaaataaactcctgctgcatcagctcgatgatcttgtgggtcaagggagctgtggcagccctctctgcactttgggaatgttgggcctccaagttttctgggttcagagcaacagggacataggatgaggagtagaaggaaggaataaacaggcatggaccagacattgcagggatgcaaagggaagttctggagccaagtcttcaaagctacagatcaaaaactcgggcaaggagcagtggctcatgcctgtaatctcagcgctttggaaggccaaggtagatggatcacttgaggccaggagttcaagaccaacctggccaacatggtgaaacctcatctctctgaaattcaaaaattagctgggtgtggtggtgggtgcctgtaatcctagctacttgggaggctgaggcatgaaaatcctttgaacccaggaggcagaggttgcaatgagccaagatcatgccactgcactccagcctgggtgacagagcaagactgtcaaaaaaaaagggagggagagagatagggagggaagaaggaaggaaggaaggaaggaaggaaggaaggaaggaaggaaggaaggaaggaaggaaggaaggaaggaaggaagaaaggatgaaggaaggaaggaaggagagaaggaaggaaggaaggaaggaaggaaggaaggaaggaaggaaggaaggaaggaaggaaggaaggaaggaaagattactggtgagtggtcagatagatggatggatgaatgaatgaattctaagtgtggggttattccttgtgcaatattgatattgtacttcataatattatacttccaaaattattagagtaaaaggaaatgattcaaaaagcaaggaaaggttcagtgtgctgaaaaatacagtaagcccaattcctttctcacccaccccactctcagccacggaaagaggactgatactacagcatcagagaccatccaagacaatacagttgtccctcagtatcctcaggggattggttccagaacaccctgtggaaaccaaaatctgcagatgctcaagtctctaatataaaatggtatagtatttgcatagaacctatgcacatcttcccatatactttaaatcctctctagattacttatacctaatacaaggtaaatgctatctaaatagttgttatactgtattgtttggagaataataagaaggaaaaatgtctacacatgtttagtacagatgcaaccatccttttttaaatttgttttcaatatttttgatccacagttggttgaatccacagatgtgaaacttatggatatagagagttttatgttttttgagagagagatggggtctcactatcaaaagcctggggttgcccaggctgctcttgaactgctgggctcaagcaattcttccacctcgcaatcccaaagtgctggaattacagacgtgtgccactgcacctggtccaactgtgttttaaattattcttccagggtaatatagaaatttggataaaattcttgaatttgaacaaagtagacaccagtttgcacaatgcaggacatcaatccatccatgccctttgtctccagatatctggtgtggatgtgcattcatgtcaacacaactttttaaattgcattttttcctccttctcactcatgtgtcttcagagtaaactgaagaattatttcagtggagccataaacctctcggtctcccaagacatacatatggactccatgtcaattttctctcccacactgcacctgaactatttcaaactatcttcccagttgaccaaaccagaaacctcagagtcgcccactactctgacctctctctaacccccaacccgttagtctttctctcataaatctctctggttcttccagcccacagcctgtccactctcatccaggtctccaccacatctcccctgggttgtaggagaagctcttagctgcctcttggcctgggctctctcctttaaatccatcctatacctagaaaccagagggatttttccaaaacagaaatttgacctccctggtcccctggcaacccatcaatggcttcatgctgtctttaaattaaatctgaaccccatgtgaggctctgcacaattcggcctctgcttgttcttccagcctcatctcaccactccctgcttctcacccgaggcctagcagcagcctccatttctctggctccttgttttctgtcactttcaatcattagacctcctcttctagttcctggaactcaattgctcactccatctcaatcctttttttacctaagcacgattctttcactccacaggttttgctgaagtatcctaccatattctgcaagagagtatctcaacatcctcctagcttaacacttaacaacatagtattatgttagcttgatcaactcactctcctccccttgtctgaaagatcaaaaaaggcagccccaggccaatcgtgtttgtgttcctagcacctaggccaattcctgacttaaagtaggtattagaaaaaactttttgaatgccagacaaatccatgaactgaggacaactctttgtttattcaacatatattaatggagggcctgatatgtgtcaggtatagttctcagcgtgtgggatacatcagtaaaaaacataaaatgcctaccctggtggtgcttacttttcagatggagggagacatttatttacatatttaacaaatatttatccggcagagaatcattgcacacacaaaaaagatggggtggcctggccagacatgtacatgacagatcagttctaaaatattttccttgtttttagtttctacttcaatgaaaaatttgtcgtcatcttagtgttaccgtcctggaaattctcaatgtcctctttgcctgctcaatgtttctctgtaacagtgttcatcatctaatataaagagcaacacaaacacatagtttgtgctcaatcaaagcttgtggaatacagaaacaaacaagaaactccaagagctcattcagtaaacttacaaacaagtaagaagatgagcttatgatcagcctgctcaaagcaaaagaaaagggaaggaaacaatttttctaagagcccttcagaaaagggagaaaagctttgcaaaactcagagaacccaggagcagtaactgatctttatgatccagtacagaagcctgagtaaccgcaggctgtctcaggttttaatacaaggttatttacatagttacctaattattatgtctcaatagagggaaggaaaaaaagcaagtgtttttctactccctatttgccttaaagatctaagggtaataaattgttagttttattcttaattggtacatgcttcttccaatttcttttctttaaaaaaatcaatacgtggtttgcgagacctttaatggagagtaaagaactgtgactagacttcttccttattattgagataatctgtcagcatttatcttttaaaggggcctcaggtaaggcagacatgattaagtttttgcagtagtaaatgctgggccatttctagagttaaaatgatatgaaaaatataactgcatcaggctatgcctgataaaagacagtgtctcttttgcaaaaatgtgggctgtgggtctggtctgctgaggcagggctcccaacatcttggaaatgttgtgcccaaccactgcccactgccctggccgagctcctgcccccactgagcttcgggaagtgactgcggctgttcccagcgagcctgaccagaggcagaggccactggtaaccttaaccccacgtgggcaggccctcgtcagagcctctccccaaccctaaaattaaccagtaagtttttggaaggggaggtggacagagaagtgcagggccctgtttgctctttggagcccaaaggaaacaggagcctgggagctgacaccctgggcctgaaaaattgtaattgttagacaagcccaggcatgtgaacaagagcttccctaccccaatctgcaaggcagacaccctgagagtgttagagttggtatgggcagggtccttcacactctgaagtatgtggttacccagcaggctggtgggcagagcatggaaaagtccgaatcaaccataatcaagtaaatggctaaggccgagttcaggtaaggccctgcctacaaatccaactcacattacctgtgcacctcattgtgcctgtgccagacaatgtgcctcaatttaacctttgcaaaacttgtctgatatggacatttgtattctcgtttgatagataagggagtaagggctcagagaatttaattaaccttcccaaggccacacagctaaatggcaggactaagattcactatcagtctgttgtacttctcaagttatctttgctctaccaaacatcccaagcaaagaagttaacatgatgtaatggtgaagagcatgggctctatagccatagcgcctaggtttgaatcctggctctgctacttactagctatgtggctttaggcaagttacttaacttttctgtgccacagttttctcatctggaaaacagggacaacagttgtatatttatcatcgtgtgattaggagaatgtaaatatgtgaatatttgtcaagtacttagaagagtccctggcgtataatgaatacatatacatgtttcatgtgtgctaaataaataaaagaaagggatcttttcattctcaccacacaagagttcattttccagtctctggactcagaagaaggtgttttgcagtttcctaacatcatggagtccgaaaagtgcttttgctacaagggtctcactttactgtcacaacagctgtctaaagaagaaaggaagattagacccatgtaacagaagaatacactgagacttgacaacatgaggacctttataaggtcatttagcaggtaaataaagagcaagaaagatccaactcgacctttctgaccctgaatccgtgctatgcccacactctaaataaaagcatgaacttgtgagtttgtggatgaaagcttggcattgcgtccaaaatgaggccatgggacagactgctgctgccatttaaccccaggtcctgagaaattcctcaacccttcccatgagtcagggactcctggattcagtgctgctgtggactgcccattatgcctctcccctgtactcaggagatggaagactctctagagttgaccactgtgaaccaaagacaatagagtgttctctttttgcacaaagaacaaaacagaacatcaagagtcttagtgatttattcaagtcacatgagttcaatgagtagggaactgcatcaagagacagcttccagttaattttatgaaccttatatgcattgcccaatatgagtgttcaaccccatggttccctgttttttttgggttttttttttttttgtcttttttttgttttgtttttttgtgcaatcaatgacctaaattctagggaagttagggtagaactagagaagacagggaagagcaaaagaaaacaaaatgtgctcagtttggttccgaggaagggtgcggaagctggatccagatggtgggggtttggggaactggataaatcaagagagttgaggtccttggaaaaactgaagacggatgttttcaaggacatagaaacatggctcgtagcaatgctcctggaggcccagcagagaccagcaatacttgatctcggggatcaacattagtgtcttaatgctggttattgtcccaaagtaagtaaggtgtgcagtgttcaagatctgtcccattccaatgatgaggaaaccaaggaccaacaagaggtgtgcattttagagcccctccccatcccaggccaatgaccacaaaaccgattctgtcccccttcccccacaggtagtgcctatgctcctgatcctcccccaatgggacaaggacaggccatttgacccaagcctgttcctcaagagattgacaataaaaatgcccacattttaaatgtgtacatgctacaattttctgattataaaatcaatacaagcttatttgaaaagaacttggatctgctggtatgtgcacatcctttcttctgcaatgaatcaaaggatttattaccaatggtttcatctgggaagattgtaggtgagaaggaagattttggattttgtttttgagctgttttaaattgtgtgtgtgtgtgtgtgtgtgcatgtgtatgtgtcaaaaagatatctgggaaatgggattgtagaccacttcgttttgtcttattatggtgtcatctgtgtctccatagtaagagagagaaagaggaaaaggagtaggttaataatcaatcttaaataatttgaaaactaaagaaaatcaaaatcaacagtaatcataccatctagatctaaaggctcatatcattttagcataccttcatgctgaaataatgaggattattctatatctaaattctaaattattcttttatttatccttattttatgttatgccacaaataattttacatatcattaaatatgcttcagaagcatccacctaatggctgtagaggggccttcctagaaaataactttttatctataaatttcatgttcattgagcacttcctaggtgtctcctgccaagcacagcttccatggcgagggttagatgacacacaccatggcacaatgtgtaaccagatggtttgatgccagagactatgtgcttaaccactttacttctacatggagcatggtttcttaagccaaccttcctctgtagcacatgtacattgttcccaattcgtcactattgaacaaccctgagatgtacatctttgtccatagatctttacatctctgagtacttccctaagtgaacacttcacaaaagagttgtttgactcataagaataaaaatgtttaaggctcttgatgcatttccctaaggaacccacttagcatctccacaacagggtttgagaaggtaaaaattagaactctttttttatttatttgtgacttatttcattacagttgagctgatttttcagtttattagccatttacatttcttagtagtcaacttattgttttatgttaactcacctcactgatacagtaataaatttggtgttcctttagtgtaggtatgggaaatttcttcaaaaatcaacaatattcttgtctggaacactgaattattttctagaatgcagatgcattgtcgacttatatgagtgctcgtcctggaaggaaacagatggtgccctgaacggggataaccgaggagagtttattatagggagcatttacaagggtgtgagcagggttaaggagacccagaagagttggtgcagcatccgggggctggcaacacagaggagccattacctcccctcagtttaaaggggagggaagagcctggagagagtagctgtggttgtcagagaagcactaggcagggcaggatgcagccaaccctcagaaggtaatactctggtgtcctcatctcttccacctcagggtgcagggtagaattgctacactatctcccatgggtctcatggtaaagcaataacgtctaaacaggaagccattaaggcctctattttgatcaaaaaaacagcctctgtaaatccagacaggatcccaggggaccagcatcccagttcagggcctaagctgtagctccaactggctccgcctcctctgtgtgtttcccttccttgatgcttttaaaggaagttgctgtcggatggaaggcaaaacttaggttttctatggcacagttttcaggaagggcaagtcactctttggctctttgggaaactccctcaccccataccccactcagaccacctccaaatgctctaggctgggtctgccatcaatccctgataacagacacccaagggagatggtgtagcaattccaccctgcaccctgaggctgcttgtctcagcatgcaagaacagcctgtgctgcggcaggaaaagtctcctcgagcctgtgaaagagacgaaggagagcagggcattacatataagccagagtgacttggaagtctgcagcctgtctccttcgaaggaagacagacaacatgtataagaataatggcttacatcaatgggccccaacctctggccacatactaagccaaccatttcatcctcatgacaatccagtgaggtagggactatttttatccccattttacagattagtaaacaagattagtaaacacagagaggttacaacttgctcaagttcgctctggtgccttgagctggtgagatggaggaagtgaaatgcaaagttaggtgggtctgaccccaaacccttcacacacatcttcgtgctgcactctgagggaaacgacatagggcctgggatagaagcctgattcagcttcaaagtattttaaatctctgagcctcagactccctctctattaagaaaattaattttttaaaagccattgattccattaatgccccccccgattgttgtaaagctcataggaactgcctgcatttccccggttatcacatgactgtaatttgcttggttgggtctctgctcacaggtcagctcaaccaagagggttcccctggtaacccatgcaaaacagcagggtctcgcctccctgccccaccacccagacatcctcttacttcttactctattaattttttctcatagcacgtaacactagctggcccattatgtgagtgtgtgtatgtgagtgtgtgcgtgtggtgtatgtagtgtgtggagtgcatgtggagtgcatgtgtggattgtgtgtttacacatgtgtactttttgtttaatgtctgacttcgcctctatatggtgagccccaggacagtagggaccttgcctgactagcccaccagagtgtccccagtaccaaaaatgacactgatacagtatggatatttgtcccctccaaatctcatgttgcaatatgattcccagtgttggaggcagggcctggtgggaggtgtctgggtcatggcctcggatccctcatgaagagcttggtgccttcctggagattatgagtgagttcttgctctatgagtgttcatgagaactgatttttgaaagagccaggcacctctctctcctctctcaccacgtaacacctgctccttttcaccttccaccatgagtggaagctccctgaagccctcaccagaagtagatgccgataccaggctcctggtacagcatgtagaactatgagccaaataaatctgctttcttcataaattactcagcctcaggtattcctttatagcaacgcaagcaatctaagacaggcaccttggcatatgcaaggtgctcaacaaatatttgagaaataaacaagcaaacaacaaatgggtagtgaatgaaattaaactgtatggtacttggcacatactagtcacaaaatgtacttataaaatttattttattagactctgaatgccaggtgacttatgataaatgagttcacataaaatgaacaaatttttgacctatcctaaacaaaacacaagagcccgtatgcggaaggggaatagaagtattccaataacttctttttgagaagagttataacaattgagtataaatttaagttatgagcttcttattagcaaaagcaaggaggtaaaccagatgagatgtcacaattctattagatgcagaaagcagtatactatcacccaatgctaatatcttatcagataccttgggtgaacaggaaggtattatggctccacttggcctcagcagatctgcttgaaagaaatgacacagcatttaaattttgttccatgtggtcgactcagtccactttctcttctttctctacatgcaagcctatataactagttccctttaggaggaaaatgcctggcttccatagttttcccttctacagcagaggtgctgaataggatgagctatgtgcccatttcctaggttgaccagacaccttctgagactgctgtgagatttcctggcagggatcagttcacaaatgtagcatgcctcttcaagagtgagaagactttgagggagatatacctgagagcactcaataattgaaaggcaagaaacaccacaaccagagcagcctcccaaaggcagggacaatctgtccttggaaacagcaaacttactcaaattagaagcctccgtgcgggtgtgtatgaatgttgattcaacccttgttaagcactgaccctcggaggtagctacaagccagagtgtcagctgcccagaagctggaaagaggtcagaacaaatgttccaatgatgtgatgctgtcctgcccctagaaggtgccccggtgcagtgggaggacctttggagcccaccaagcctggattcaaatctgccccctaacttgttagccaattgaccttgaacccttccttgcacattgttcccttcatctgcagaaggtgattgacaccattgccctgtgcagcctatcagctacaaatacaggtctggggtcaggctgcttgggtttgactcctagcttaccgatggggtgtccttgggcaagcaccttgtgttctttcttttattttctcatctataaaatgggtatagacatacctacatcctgtgactatggtaaggaccatatgtactaaaccatgtaaagcctttaacccactgatgatggaggttgcaaattttttctgtgaaaaattggaccttggcgatgaccttgaggagtaggatataaataactcccacaagcttagtgttccaataacggaatactaggtatacatgggttaagacagtgctcttaaggataagatgttacttgttttgattctccaaaatttggggcttggtgtgaggccaaaaacatgtgagtagttggcacagtgccaacacttagtgtttgcatctctttcttgcggaaagccagattcagtccaagccctgcttgggggtgagagtaaggtcccttctgcaaacccaaaaaggggtcccagggacagttggatgaggaattccaggccaaagcttttccttggatgtggcagtaagaacagagtgcactgggaacgggctggccagcgcctgcccccctgggagtcacaggaacagaaataggaagcccgggctggtatttacagtaactcttcagcccctgaccacattgtcttgtctgtggtgcatttattttggggacaagtactgaagtcattgctgcccgaaagtgctccaggcgggcccgcctgtctctgctttcccaggagagccctgaggtgagggaaccagacccacaggcaggcctggaggtgccctgagtctggaaggctgaccgcaggcccggctcaggcccctgccagagaacaggcccaggctccccaagagactttgagaggtgcccccagcaggaagctcagaggaggacgaggcggagggagggatgtcccgccccacccacccacaccctcatctcactttccttttccttcaagggctgccttggcctgccttcctggctgcgagtgctcctctctctccatttcttataattcagcagggaaaaggggaagtggattcttcaaagcctcttcctggccttgatgagcaaatgcatggtcccaggcccgggttctggcctaggcaggcctccattagccgtagcctgcctgaatgacaggcaatcctaaaatgccttcgttcctgatacctttgcttagcagaagcattgagcttccctggaggcaggcctaaggctccacctgtgaacggaggcttgatttcttcaagactgtcctatctgggaggttgctctggccagagccttaggagctacagtgcatgttgtagactatgaggctggctccccctagagttgtccagagcacaaccaaatattgtgtgctcacctctagagcttcatgaagcagaattttataaccactagacctgattatcactttgcaggcttggagagctgacactcctctatcaggttagcatttagcgagtacttcacttaccctaaggtgtgagttcatagtggcttaatccactaacattccttaggggtgtttgtgtattcactggacacaaaaactgtttaatgcccaggtttaaagggcatagctggagaatgctaggcattgtctaagacaagaaagagatgctgaggtccaggagactcccttgtgtctaacagtttattcgagaatagcaaatgcccgcctgtctgtgaccagtgttttcttggagccaagaattatgcctcttgggcattttgaccaccccagaagatatatgccatttttactgaatagaggagaggaagaaaactcagatttatcccctacccactattagccagaagttatgctagcactgtgacaaatgtcatttcatttattttcacaactacccttctgggctgttattatcacctcctggaaacaagtaatgtgaggctgaagggaactaagcatattgccttaagtgacagagcaaataagaggcaaacttgtgatttgaacccatgtctgtgtacacccagagtcagtcctcccctccctcctgccgccatcagatggaatcccatctgtgttctgggtatcagcgtcctctgaggagttcactaaaatgtgcattccagttgaaatctgaatttctaggagtcagtcccagaaatttctatgtaattcctccctgccctcaacaagggattctggtacagaacctggtttgtaaactaacgttttggaagttaggttgacgtttgatagtagaaataatctcactagcctagggaattcccacatctttgttcatgcaaaggaggatgtcttttgtcttccatccttgaaggcccaattctaatttaaccttctccaggaagccttcttggactgtttatccagcatgtggtatctcctctgtttcctacaattatctccttgtgcctctctaatgcactaaccactgcatgccttggacaggctatctgcatgcttttacctttcctagacttgaaactcctcctggacaaacctggctttctcatattagttttcatccattcacactcattatcatggaggatgccagaaacctggacagagccctagatgtaaatcaaaaagcaagcattgaaatgagttatgttggatagaatgatcaaggaactttattagaaacctatatctagatggcaaacctgcagattcctcaaaatcctcagctgcttctggctaatttgacttttatcacccaaatccctctaccagaaataatctctctctccaatatatccacctggtgaacttctcttgacacttttcaatcgtcatctccttgcaaaatcattcccactcagagcagcatttactacacctgcttctgggaaagctctgctatgctaggacccaccagaggatatcctatactttattgtatgcctttccctctgggctgcaagcctctgcaggacagaattaggccttactcatccatcttattcattcctagggccttagtgtttggacaggcacatattagtagctcatgagaagaatgaataaatgaatgaatgagtgaatgaatggaaaaataacagtagcaagtctgggtaacatctcaacagatgggtcagtttttctctctagagtcagtgtttctacaagaacataaacaaagggcagccagctcgctaccaagacccggctccacagattttcctgagagtcatcaggtagccctgggtgaaagaagaaagtccctaagatcagctccctctctacctgccagaggtgttcccaatacctaagacaaagccagggacatgatagatcgttcaaccttacctcctcccacaaggtctctctttcatagtgtttgcctactggagaaatttctcgaagtggatcctggagtgtcacaagagcccttcacaaagccattcctacaacaaaacgtggcctggcatggagctctccctccttgcttcttgtcccagagtctacgggcatcagaaagtgatatgcagggagatcccaggggcttcatcagcacgttcagagccaagtcacaggggtcaatgtttttccccatttctgctcataatcagtaacaaatgcagccatgactctgaacttgcttttctagtactttttaaaaagacctttagccacataatttttattagctctttcttatgtttttgtcatttaacaataagaaaattcccacaaattgaagccagacatgtttacatgggctatcaaaagccactatacttttatcaggttcatctttatttattcagtgtccttagctcactagtcatgggttttcagtgtctccttgttgttttgaaagccagaagatgctggcatatggtacaagttgattctccactatgcccatatgcctaaaacccctagaaagttctttgttagggagagtaggagagacatgtgaaatgaaaatctctgttccatttgcatgtattcaattgaatgtgccatcctgtacatataattaagccctgatatatatcataattatgaaactggcacaattttgtatctcattaaagtggcgtgattagaacaatagaatgtacgccgtacacctccctcctttcaggtataaaccaggccaggtttctatggtgtcttggagccttttacataatccgtctatcacagagaggacatgggctcctggaaaccacttctgatgtacagtcactgacacctactcaagctgggaccatgcccacctacttggtgctcagactcagactcaaccattcctctccatcccaggctcagtgaggagaaaaatcaatattcctaagtgggaaaagacccaataagttgctgaaaaagttacttccatttatatgtttgcttttaagtggtcctctttggggcagttaaatggcaaagtggccggagcacagaagaggtggcagccagcccagctcccctctcactaccttgcaaccccagaaaagcaaataacctctccaaaccttgcttccctgtttattagtatttatttatttgattttcttaagtttgccctttgtggtaagaaatcacctcagggcacaggcacaagagagtaacaattcattaaactacatacaactgagctgagatggctgacagcctcgaagtaagagacagccagacaagccttttttaaagctttggccccctaacttgccagaactaccgtaggagtccaagaacgcagcaaggaagcactcactagatagggagagaggctccagctcccagagatcttgggaggcgttagcagcagtgcccaggcaggctgaccatgctctaggagcaaagctcatctcaaaaatgtggaaggttggccgggtgcggcggctcacgcctgtgatcccagcactttgggaggccaaggcaggcggatcatgaggtcaggagatcgagaccatcctggctaacacggtgaaaccccatctctactaaaaatacaaaaaaaaatagccgggcatggtggcagttgcctgtactcccagctactcaggaggctgaggcaggagaatggcgtgaacccaggaggcagagcttgcagtgagcaagatcgcgccaccgcactccagcctgggtgacagagcgagactccgtctcaaaaaaaaaaaaaagtgtggaaggttctccttagctttaaaggcagtgtgggagctactgagaatctagaagaaaatctggttgagaactgactcaatcaagcaaggtctgggcactgtcaacaagagtgaccctgctcagaggcaggccagaacccccactgggtgttaaaaagaggcagaggagctcactctccctgagaattacaattgtccagcaaaggaaaatgaagtgataagctccatccccaggggaatccaagcagagatggagacctgctatgttccaggaaccatgccagggatctgcataaaattcccagggaaccagatcaccgaagttaggaggaaccatgccaagcaggtgagatacagctcagtctaacactaattcacacaacgccttctacatagaaacattttttcaagactcctttgataaagcctactgcatacgttccacggccctctgtcttttccactggacaacatatcttagatatcattctatgtccatccagtaatggggtcttcattcttttcaatggctacaattagaagcatctatcaatgtatcactttttacattgagtttccagtgatgtgcattaaggttgtttctagtgatctgttatcacaatctttgtatatatgtcacatgaaagtgtatctttaggtcacatttccataagtgaaaacactaggtcaaagagaatatgcctatggaatactgatggatacattgcctggagtgcagtggcaccatctcagctcactgtagcctcaacctcctgggcttaaatgatcctcccacctcaacctcctgaacagctgggactacaggtgtgtgccacaacacccggctttttttttttttttttttttgtagagatgaagtctcaccatgttgtcccagctggtctcaaacttctgggctcaagagatccttccacctcagcctcccaaagtgctgggattataggcatgagccactgtgcccagcctggttctttggctgtacatgccctcttcccctaaaagtctctccaggttatcaactcatatagtcagagggctgcactccccagatgaaacataaatctctgtttatggaagcccatgaacacattctgaatacttaagctcaagagaacaaagcctgaagagggaatgtctctggtctgaagtccaccttctactttcccatttctttctgtagggtctgtctcttcttcatactattcttatccatagcacccagtcctttcccttcctgaagatgcaaccctagacttaaccactagacaaacccagcagaacatattgtcccagtatccgtataagatctatacatatggtgcttcattctcggcatttttctctctctaatcactactgccttctaaagaaaatgtggtatgctgtttaacaaaaggctcatgttatgctgagcatgttgataagtttggatagacaaatattggccaaagatggagctgaagctggaaagagccaatacacaataaagccagaggaatttggagattccaagagcaacccatgaaagaggcgataaggaagagaggtagggaagggggaaaggaatcaaagagccatcaagatatcaggaggttgggagttgtgttgtctggggaacaggccagtgatgcttctccagaggtcctgggacccaaggacatttcaaacaaggaggttacctaatgtttactctgaagcagctgtgaagctgagatgtaggtgctatcttggtattcctaattgccaagccatcgttgaagtctaaagagttattacttctgtatgcgtgtaaggcaggggaatagacaatcaaggaaggagctgaccatgcctgggttaatatggcatggatcagtaagtgctctttcagaggtgaacctcagggcccaagataaccatggaaatactagcttatggggattcccactcttagcaaggacctccattgatcaagaggtccagagagtagagatttcacctgatctctggaccaaattatattgcacatttctgcacctttctccatgagggtaggccaagatggctattctcatcaccacaactcttctttcaggttgccacatggccttctccttcacttcaatcaggtctctgttctaacagaaaatcattcctgatcacctaactacagccataccccctgccccaccttctccaccccctaaccctgtcacctagcattgtatatttgtttatccccttattgttttcctccctccctagaacataagccctgtaataatgggaaacttctcacctttgtcttcttggtccccattacctagaactatgtctagcacagagtaggtactcagtaaatatctgtagaatttattaagcaagccaagaatgactggagtacataaacatgaaaacatttggacgttgtttaaaactaagcagattactatgttgagtgtctcgatgtagctgagaaaacaactatttcataaggaacagagtgaaataaaagtcgaagggtttaaatttttttaattagtccttttattctcatgttttgcagactaatagcaaccacggacttagacacatagaaggattttatgaattgcacatctctcagcagggtctgactgcctgcatggacagggagggtgagtcccagtccagataaccatgaacatccatgagtaattatgaccaagatcctattaccaagccaaaccttgcactaggagttaggcatgtgttactgaggtcagcagttggctcttctgtccactgttttgtgccagcccagacaacttaatgctctaccagtgattatacaaattgtgctctcactttttttttcaattacagaagtagagaacatgtcatgatccatacggagaaggaacagagcactgagtttaatccaagagttgtctgcatttccatcatcaaactattacttttccactcatcctgacccaccaccattctcccactctgtgttcagaacagccatcactgcagagtaagatgccattagctagccattgaggtcattagctgcatccacacagaagagcagggaggccaaaggcagcctttggaaatcatactcaagctaccaaagtgaagagaaagcccctggagattcaggggaacaggatctctggcccaaataacccacagctacacgaagagatgcaaggaactgagcagctacttcatgatgtaagacatgtagatgaattatctaaattactcagagtacctgtctacacagcctcagcttacttgagaattgttcttccaggcttcattgaagtcatgaaataaataaaaagccatggaacataaataaatatcatagaaacccctcccaatatatggttgctctccttagagggatggtgataaaatcaagtctgcattcctttatagcatgcatcagtgttaacaacccagcattgtttaagtgaatttgacacatatctgtgcaaataaattaatactctcactttgactgatttttggcagaaacaaacaggatgccatgccaatttatgagttgacctgttacaagagcccttctgaaaataataaaataaaagccatgcaaagtacttcaatatatcttaacaccaaaattaaagaagtcagcttttctttttccttttctctctgttcacctaaagtcctctgacctgttaaactgtgtaatacaaatgtgctagtgatagcagttgtgagaggaagaataaaggtaacaggaaatgggcagggagcaggcaggagatgcatgtaacaatttatcaagggaagagaatgacacctcattgtctatattaagaagagctagaaataaatcaataaaccatttatttattcttcctgaacatccaacatccaatattatagcataacatatatctttccacatgtccacactaccttttttaaagagtagagtcaaaattaaccaaatagccaatttataaaaacaaaagcgttgagagtgacaaatttgatcaccttttcctatcacttcagttgattaaatattatgttctgctttttgattatttagtctataaacaaaaaacataaatacagaagtcaatgaatttttgtctatttataagtaactatccacgtccatagcttcaggaagttttctcatgctccttactgggcaatatccacctcctaccccagagtaactcctttcacctttgtgaaagggtgagagtgacagcggtgttgttgtgtaaggtatgattccaattatataaatttcaagtaagaggaaaattaaacaaaagtgaaagaaggtgacttctttagatattagcaattttactacctttggatattgataaataccttgacctataagattaatacagtttaattataatctataggattcagatacttatcttaatattaatatttttagattgttagctatctcttgagcttgagtttttagatattagtaattttcctcattctcaaattttatattactggaatcatacattatgttctctcttgtgtctgtcttctttagcgcaatatggtatttataagatccatccattttgtggcatatatccttagtttactaatttttattgctgtgtagtattctaccatatgaacacaccacagtctgtttattttcctgctgatgagtatttggggctattatgaaacggctgctgtgaacattcttgtacaagtcttttttgtgaacatgtacctatgtatgaatttctcttgggaatgatttctctagttcataggataggcagatatttaactttattcaaaaaagccacagagttctgcaaggaggttgtaccatgctgtcatttgcttttaaaataactacgttttgaccaaatacaacttatatccacatttcttgtttccttacctcctgtgaatagtttattcatggacatacagatgttggggatggcaggataccatgaaagaacacaacaggctttggaatgaacttcagataagcttcaaaactcaatctccccactcactagtttacagacttgaatcaaaattttacttttaggccaggtgggtggctcatggttgtaatcccaacactttgggaggccgaggtggaaagattgcttaaattcaggaattcaagacaaatctgggcaacagaatgagacccccatctctaaaaaaaaaaaaaaattggctgggcgcggtggctcaagcctgtaatcccagcactttgggaggccgaggcgggcggataacgaggtcaggagatcgagaccatcctggctaacacggtgaaaccccgtctctactaaaaatacaaaaaattagccaggcatggtggcggccgcctgtagtcccagctattcgggaggctgaggcaggaaaatggtgtgaacctgggaggcggagcttgcagtgagcccagatcgcaccactgcactccagcctgggagacagagtgagactctgtctcaaaaaaaaaaaaaaaaaattcaaattagccaagtgtggtggcatacacctgtagttccagctacttggaaggctgagatgggaaaatcacttggacctggaaagtcaaggctgcaatgagccaagatcatgccactgcactccattctgggcaacaaagtgagaccctgtctcaaaaatatatatatatagattatttttaaacatgtcagtctcagtatttctttgtaaaatagcaacattatctattactctataggcttgctgtaagaatgaagtgaggtgagacaggtgaaaatatctagcacaggttcagccatgtggcaggcactggataaaagcaaattcccaagtctccctgcattccctgagcttgacgagcatctttgctttggggtgttaagaaattctctctctctttctctctctctctctctctctctctcctaggccccagagactggggagcaaggaggtcaggaaaagaaagaccctgcagaatggaaggtcaagggaccggatgaggatgaaaatccaccctccatggcagaagggaaaagctctatttacagtaggacccagatggaactgatttgttcagagccatcttattcctgagtgtgatatttgtccacatcataaaaccacaggctacaatgtgtctgacattataccaagtgatataaccccttctaatgatattataataaatcccaaatgaggcagccatcactgggcagccttttcaaagtgttcctgaaatagtttttacagaacaagggatctgcatgccaaatgcagaggctcacatgaggccagaggagttagctcaggcatacacatgaacacaactgtggcttagttcttggctgggaactttttctttctgtattaatctattggtttttatgaaagtcaaaatgttttttttttttacttttttatatgaaggatgaacttggatattttctaagtgcaataaaatgtcccccagggtgctttttttattattattctttaaatcagcagtttttgtgcctcttcattagtacaagtcaacgacctttcatcttggcttcacctccaagaaagctgaccacacttcctgccatcctggtggtagaagcttgtttttctctgttgttttgctaacatgcataggtatatttctgagataccatgtgatctgcttccacaagcatagggagcttgctgactcaggaaccattgaatttttttctaggacaaacgtgtagccctttctgcccttaaaggcaagaaccgcaggaaatcatgtgtctttactaatagggttgcatacaccatcctcctggactgtgctcttagaattagtaggatctggaacaaaaaggagtatctctcacgatcaccagtaccccaccactaccataaccagcgtcaccatttccatgactggattcacaacaacaccactgttactctcaccctcgtcacttcccttgcctgtctttcccacataattattcttctggccattcccactgcagtggataatctattgtctgcatcttcccaacacacctctttccttccctttccccatgtcatgtggttccatcactggtccaaaatttgagcccaagatacgaatacatctgttttactgatattgggaaagactctttttttattctgtcactggaatcacaaggctggtctgggtaagtctaaaattgctagagattactaattgccaacaggagaaaaagagcttatttaacatgaaatatacaccgaagggagcaaatcagaaaagagggggaaaaaaagagagagaagctcttttaaaattgttgagccacctggattcagccatgcccatagttttagttatttaaaatgttaattgttttgcttacactgctttgaattgggtttcttttggcataaaaatgaaaggatttgactaaaaccaccctccctgttacctggttcatatttcccacctctattccaactacactccagcttggcatcccatatcaaagtgtttgctggcaagccagggcctggggttgagattctaagggataactatgatctcctacctaagtaagcctaaagatgaagctacatttcttaagggaaagcaagtccttcatgccaaggagactaaacacaaacttcaagcctggaacaattaggataacaccaagtttaaaacaagagtaaaagacctgagataattgttcccgacactaacagagtacaggaaatttcctttatggactagcattttggttagtgaagataggagggtgacttagcaaatacaaaccaagatggaaggtaccactttcaccagcatcacagtccaccaagtatcaacagcatcatggtggctgtcttgcatttcatcttttactgggcatttagaattcagcagatacaaaaagggcctctactttgcaggagtatatattcccacagggtggaaatacagaaagacaaattcaacaaataaactttcacaagcaacaaaaagctatttgtccccaaaagagtggctaagatacgaggtgaacattaatatacatttggagatgtttgggtctttcttttcataggattggccatctttagaaggcaattattttaaaatagcattctgtttcctctggtggtacatttctacaccttccacaatggtactgcttttcaatgctttaaaaaccacagtagaaacacaaagaaggatatgtatgcattctcattttcttgtaccttcctccccaaaatcactttcaccaccattctcatcacttctactaccactagaatggcacaatcctgggacataggctgggaagaatgatacatcttttctcataactgataatgcttgctgataacatgtactctcttcctggttttaaaactaatgtatgtcaattatgtatttgttaaatacatttgtttacaagtagcaaaaaccaactgaagacaacataagccttgaaggggcctatgatagaaggccataggagttacttgagaacctaaggtgcaggctccagccagtcctccaaacagactggacccaggaagtcccagatatgccccttctttctgcttctctcagagtcttttgctccaatcttctctcattctatgcactagctttctcctagcagttcccagaggatccagagcctagacagccaaagcattgaaaaccactgtgaaagatttagaaatgtaccaccagaggaaacaaaatgctattttaaaataattgccttctaaagatggccaaccctatgaaaagaaagacccaaatagctccatttcattttcttctgggtgctactaatggaaagcagcctagtacggtggatgagagctgactccacattctgctagctgcatgactttgggtaagctttgccccttgcaaaaataaaaagaaataaggccctcttcagaacaatgttcatccatggaaaacactctgtgagcaggggctaacataattattaatacaaaaggggtagatgaccagttcttttgattgaaaacacgctgaaggattgtggacattcaaagataaggcagaagatacctttaaaattaggaatcagatattatagactcactccaattaacaaagagagaagaattccaagtttcccagaacaaactgggaggagagaaacggagagagagaaaagtagtatggcaagagaaggaagcttaacatggtatagtgttacccatgtggagagccaaatggactttgaataacaggaatctaatacaagggatcttaatccagggcccatggatcccaattgatatggagataaaattcagggagtccttgaactgagttgggggaaaaattacagcttagtttcaccaacctccaactaaaaattaacattttcttcaattataaatgtaggcaacacatcacaatagttattggtaacttttgtggctttgcaatcaatagaaatcacagatggtctcatgtcatattgtagttgttgaatacatttcaagatatcatttatacttatcattactttaatattatactcaatttctgtctaacctgtgtatcatgttactgaatgcattattaataaagaagcactttacatcactgtattaccagtttgctttttcttaaatatttgataactttatttcaacataattcattttctttataatcctgtacattttattgcatgaatttaaaaacataatatttgaaagggtctatagttttcacaaaactgccaatagggtccatgaaaacaaaaaagaaaatctttaagtatctctgatataatataggatgtattcatcttttatatggtatatgataataacccttctcttaagccatagatctttagtaagagtctagtatggtacatgcaagagattcatattccagattgtttgaaggaggactggaggtagaaataaaagagaaggaactatgccccatgcattggttaagctaccagatcagagatataagaaccacacactttgggaggccaaggtgggaggatcgcttgaggctcggagttcgagaccagcctgggcaacgtagtgagaccctgtctctacaaaaataatttaaacacacacacacacacacacacacacacacacacacacacacacacacacaaaagagagaatggaataatggaattctaaagataagaagtcactatcagaggtgatgatgagaatgcaagtcctcaaggatccacacaactcattaggaagatgtggactttccacaggacatgggatggcagttaaaatccgcactgtctaactcaaaagtggcaggttggccccaaactgacacctgtggctttaataatataaagaccaccagtaacccaagcaccacccagaaataattaccattattatgctcatataggtcttccagttatttttctgtatatgcatacatgtatggtgttgtattcatatgaagaaaagtttattgtattaacatatatgaatacaatcaattttcaaaactagactcaatgaaagcacacaaatcttactttttaaactttgtcatgcccaaaatataatttttgtggttatatcatgtttcatcatatggagatgccatctgctgtcactaaatcctctaatatttgacatttacattgtgtttaatatttcacttataaataatgctatacagaaaaattcttatacataatttttattaaactgattatttccttagaataaactccaagttatagaaaaattaggtcaaagtctactaacactttaccactcatgaaattcattgccaaatcattttttgttacaatgttaatagcctcatcggcaatgtgtaaaaaactcactttgccatctttttcatcactgcatattatccttttttaaaatattattttttgtttttaattataaggcatgtttgtagctaacttggcaaagttgtctgcaatagtacttctcattgctgcacgcacccctcctttgcaatttgacgttgctgctccttctatcaagttgaatgacatgacaggaaacagaaacaagtgtctcagctagggtcctctagatcaaccggcccccagcaaatccaccagctgactgcaatagaattgtgtaactgtgggcaagaccaacagaagaaacacccagctgagcacagcccaaattattggccctcagagtcatgagtcaatagaatggttgttattttagccactaagttttgggttgatttcttacatagcagtagataactgatataatgttcacttttgtcataaaaatgtatattaaattttagggaaaagtagtaaaatgaatccagtattccaccatccaacatagaagagaccactgctaacaatttgatgtattttattcccatctcttttatgtcagtatgcatgtactatatggatatcagaactataaactaaccttgcttttaaagattgttacaaaaattctacaagcacaccagcaaatgtaattcattaaaatattaaaaacagttatttaaaatcactaataaagagattatttaatgctattaatgagagctatttaatgctattatttaatgatacattacaaatatatgtatcaggtcaatgaaagtgcaattatctggataaatattaataagtaattggtaagtttgatgtccattttttaggaaaaaaaatcatagaatataaggaataggaaaattcaaacctaatatgacatgattaaaatgtctaccttgaaagcaatagtcaattttatacctaatggcactatataagcggcattgctattagaagtaggagcaagtcaagaatgttccctacaatatcatcactaataattgctctggaaattctagttaaagcaataaaacaagaagaacattgaaatgtaactattagaaaaaagaaaatgaatttatgaacacttactcatgacattaccacacatctcaaatcctaagacaatcaaataaaaatgtgttaatttgaagattgagtataagggcttgatataaaataaatatacattttttcaaaattgcaataataacatattagaaaactaatggaaatctatcatctttgtaactttaaaaatatttaatacctcctatatgtaatttaaaatataaatcatctagaaataagctaattactaaatgtggaaaaaaaagaatgagcttacataactgatgacaaagagattgtctattaaattatggtgtgtccataagtaatactacccagtcattaaaaatcgtgtttttgaagaatgtttaaaaacttgtcaaaaagttgtaatatagggttaggaaaagattcatgatacaaaatactatatgcaatatcatctcaaatgtgtgtgtgtctctgtcaacatctgtctctgcttctaaaaagaggtcaatagaaagagacctgaagacaagctgagctgttgctctggctccctcatctcagccaatggcttgttccccaaagctgcccccaagaccacagcctggtgccaacgatgcgtgacatcctctattctactttggaagagaaccagcctaacaagcctctacagtccctgtcacagatggagttctttacagcagagatgagcacctggccttgggaaaccagagaaacaggtcaactgaatgggtcaccaccatcagtgttctgtaagcgtgagaactcattcttcttcagccttcattgtgcctggagatcatcatcaccatcaccccatggtcatcaacatgcttgggcttcccaaaaagaagcccaaggctatatatccaagcagattggactatttgctaaagatgagtctaactgattcaacataggtatgcttccccttgctgagaaactgaggcatctatgacataaataaggtaggtgaacaaagcccactgaaagtcagattgactggtgttcaaatcctggttctactacttcccagctctgggatttggggcatgttactaaatctctatgaacctcactttctacattgtagatgtaattagtaataatatgtaccttacaaggctggtgtgagaattaaagaggatatagcatcgcaccacttatttcaaggtaataaatttaccttggtctccaaaaaggtaaaaaagtgaacgagagcttgggcttctaataaaaagactgttgttggaggaaactcagactcaccatgagtcacttcaaatgtgctgaggctgtggaactgcagaggctatcagtgcaatgtgaatggtacaaagttgggtcccaaacacagggctggaagtccaccagtatctcactgcccatgatgggtaggattgccaggagtagcaaataagaacacagggcagttagattttatttctaataggcaatgaattattaaaatgtggggtataaaagcatgtcccgaatgcataagtatgtatttttcttctgttcattgatacatcccagacccccagactatgcctgacatgtagaagacacttaataaatatttctctaccatgaacaaatttctgaatatgtaggcaggaccccacgaacggtatgaaataaaagatttataataggaattagccctaatatgactgttggagctggtggaaaagtgtacagaaggctatagactctgcatctggtggtggatctgaagttgctacaggctagcagggttggcaatcaggatatcaaatgatgtgaagaagaggagaggaaggaactgggatccacatctctctctctccatgtctaaccttgacaactggtaactttcagaagaagcagacaccatttgtcatagagctgcacatatacctgaaccaggctcagagaaactgatcaacaagatccagtggaaggagctgatcagcaaaatcatacaagggctgtagcagtgtgtggagccctacactttccatgattgcgttaatgatcttcagagtaaaatgagagctgcttcctttccaccttcctcgtctcaggtaaatttctcttgtggccaaccctaacctagaaccatacaaggaggggaatgtggggaaacatagttccatctttgctaaattggcacagttcaaaaccatcaccatctaccctttgctcaacttggcatccgtgcataactcttttaataatacccaaataaagacaccagcaaagtcatatttctgcttaacatgatccaactattcttcaaacagttgaaaacatgctatcaccccaaaagaggatacaaagtcccacatgtcactttagccatctctgggtaatgttcattcatcttgcagctaagccacacctagtcacacccttttgatattctgtaagttaaatgcagagttacaaggtttacttctcttaatgtgtcttgcatttgatggagagagaatgagagtggagaaaaagaaaagacttggttaatacaaatataattatatcaaaataatgaagaaatattcataattactataggccttatttcttcaactggtcacgtggccatggctggtagtcctggtgcactcctaccatccttttcacactccctttgcaatgagcaggtagcctggctcatcatgctttgttgcctgataaagtgacccaaagcttcattcctgaaggatctgggttgtcagctgtcccgcctgtatttggtcatggtggtttttcaacttttatcaccagacttggaaatactaatgggtgccccagggaatgccctacattccagacatactccacttacccatattacgtagtagcaacccagtcactccttggtattcaggatcagtcaccctagccagcacagtaactcccttctttgtgggtccactcagggacatgaggaggccaaggaggccaggaagcagtctcaacttccctctaattaactgttattgtgccccttttgggggagcacttctcccctgggggtctaagtcttcttggttaggaaaggttaggctgggtacggtggctcacacctgtaatcccagcactttgggaggccaagacaggtggatcacttgaggccagtagttgaagaccagcttggtcaacatggcgaaactccatctctactaaaaacacaaaaattagccaggcatggtggcaggtacctgtaatcccagctactcaggaagctgaagcaggagaatcacttggatccaggaggcagaggttgcgatgggctgagattgtgccactgcactccagtctgggtgatagagtgagacttcatctcaaaaaatgaggaaagacaggttaaattcacagggaaggatgcaaaaactttgctctcagactactagggtaatagtaagaggagttcattcccagacctatgaaacctggctgtggcgaaaccatcactgattattccagccccacaaagtgctaccacccagtcagtgccataaagtctccaagtggcttattccagaatcctatcagccacttgctttgggctgatggaggacattgaaaggccagtgaatttaatgagcatgagccaatggctgatcttcatttgctgtcagatgagtcccctggtcagaagaaatgctcctggaacactgatggtaaagagggccctctgagatccgtggtggtcctggaagcagcatttcaggcagagaaaacaagtctatttctagagtaagtgtcagttcccatgagaacaaagcactgctccttctatgataaaaataattcaatgtaattaccctaccaccaggctgatccccaggggaaaagtgccatattgaggaatcagagtgggtcactcctgttagtaggtaaagcagtgagcagttgtcatagccagagacagcagccttgaggagtgaaagtccatgttgctaagcccatgcaaaacctccatccccgccaccaaagccatttagttgatgaattatagacatacaagtgacagaggaggcaccaagagactcctgagttacatctcgttgttctgtgagcacaagcacaaagcaggaagtaggaaacggggctaataggaatacggaagactcgggactttagagaacaggctgaagtgaccagaatttatgatttcccatgggtgggtcagaagagtcaagataatatcaacatcttcctctgtattctggaagcatctcaaatgagcacagaatctgtaagggattaactgtgtgatctattctgacatcctgctcagcaaatgtgccccagaggagagaacttgccccatccccactcactggtggcaggattttggggggacccagaaagaggctggtacatcagagctcatggagctcccctttggcccatgtcctttgtgatattcatagaccattgatggctccttcataatggacctcccagaacacaaaccaaagcaaagcaaagagttctatacctccctcacttccaccttacccaagcttttaactttaaaagcctcagagaaaagatgtctcctttgttttacatgtcccccttcacttctgacatggcacccaatcagcatgacttgatagcacaaaatagggcaatgctgaatgaggaccctccagtccctgccctcagccctcatctccctttttcctgccttctctccattccaggagactgttgttaccacagccctggaattcctagcacacatcacaatggccacctggaagttcacgggaaggaagctcaaccccctgacatcaagcaaacggttgttagttcatggcaattagcagctgtacttgaggctggggagctgaagtcatagtccaggctctgacccttactggtagtgaaacttcaccttgacccctgtgcttcccactctgtaaaatgaaggtgggaacagctcgctgagtgactgttgtggggattagatgatatttgtggaagaactttgtaaggggtaaagaggtatcaccttataaggtaatgtcatcatttttaaggtggggcaagtgacagtcagacactcaagttagagcaaagccaggagaaggttgcactggcatggaaaggggtaaatagcccacctccaccagcctctctggagggtcaactccaaagttattagagttttaagttttgggtaaaaaatgtttgtccttagagtaactcctcacttcttcagagttattatgtccaaggtgttttgttctgtttgtttgttttggttttggtttttgcttcattttgtttttctgagacagagtcttgctctgtcacccaggctggagtgcagtggtgcaatctcggctcactgcaagctctgcctcccgggttcacaccattctcctgcctcagccacccgagtagctgggactacaggcgcccaccaccacgctcggctaatttttttgtatttttttagtagagacggagttccaccatgttggccaggatggtctcaatctcctgaactcgtggtgtttttattttgaaaaagggaaaaatacgttttatgccctgaggtctaatcacaaaataccttcactcttcaagtctgaccaggagccacttgcctcagaatgacctggagtgtcgttcaaatgcagatcctcaggccccatccttgactatcacttaatttttctgagcctcagtttttgagttttgaggcgtgacgtaacttttgctttaaacctcagtaagagagtttcaatagaaaaaaatgaacaaatgaaaagatgaatggcttgcaagggagaggtagaatatgtatccagacaagatgactcctattgtcccatccaaatcagacctccattatcccaggtccccaaagatgtcttcagtctcaaacaaccaacagagtggccccattcctatccactgtgcatcctggccaagtgcacagtaagtggacctcttggccgggcattctgccaatgctggagctgttaggaaataagaatgtgtgtatttattgaagaaaataaaaatgttcatgcgacgttgcacagagacgatttatgagattttatgaatgtgtcaccaaaagacccactcagtcactgccaatgttaggtctgcaaacacctgggggctcaggcaacaaagctccctgatggagtcagtgggcaggacgtgcttgtggaggggagtatgagccctgtgctgcaggtgcctgcacctgtgagttgtgtggagccaagtacacttaaatcataagtgtatatatgggtgtaaataaatgtacacacactagtggtgtgcaagggagtatgcatatatgtggaccccatgagatcgcatagcatgggccactcctggtgtgactaggaagagaggctaagccacagtgcagaagtggacccattactcacactaccttcaaaggacacagagttctcgctgctcaaaggaaggggttagtcatcacctactgctaagaccaaaagccttggggcatcaagaaaagcagattatcaagagaaaaatgtctctagccgagcatgcaagaatggatagagtctgaccaataggaggaagagcagggtcccatcttgctcacctcctctgctgggcctgaacttctcattgacattatagcctattagttccaggtctctgaagcctctctgagttctgtgaaccaggtttatgccttaccgccctcctgggagcattgtcttgtgctctccagctgccaggctggtgcaaaccacagaatgaacaagctctcctactaagccccttggagcctagagtagttcactgttttctgagggttaccttctatgggagaaagttcaagaaaatgcatagaaggtatgttattaaaagaaaagggaagaggaagagaaaaggaggaaggagaaggaggagaaggaaaaggaaagcaagaaagaagtgcttttagggtgagtccctgaatcacccagagtccatcttcataaaaatagccttaagaccccttgtgggccatgcaagaaggaggggtgcctacttcctccctccctttcattcctctgcaacaaggagagaatcataggttttgcaagagccctttgtttgcctggggcacgccatcatcacatgcatcttctcaggcacgtgagggaggtcacttccctacgagacagggaggaaccctgggcaactgtggcttggaaatgaaaccagccctttcaatgtatctctttggtgaccaggatggttggtcctgcttggagtctgaggttagggggcaagattctgtgaatgcctaccctgtgctgcatcctcagctgggcactgtcccataggctctttagtccccacctcaacctaaaagaggaaactagtgtagccatggcatacatggctaagattttaaggatccaaggggctgtgacattggatcaaagacttaaaggtggcaaatggcagagccgtcttccaggtggaaccagagacccattcctcttgtgctcccagcaccaactgcttccctccctcagagcctttaaaacactgcactgcttgtctctctctccattatcctgagtgctcttgcaggtcaataactagttctgcactcctcatcccagaggtcagcacaggctggcatggaagaggaagtacctatgaaatggcttacagagggaaggaggaaaaatggaagtgtccaggaagatgcatttctacccagcatcacccctcctgacattaggaactagttaaggctccctgatggccagaagcaagagtcaacatctctgcaacgtaagccttctggtatctgatatccccaccatctgccctcactcttgccccagagcgtctccaggtgagcagagattatgattgccaaagggagccatttcaggcctcagacccccaagcttcaccagagaaagcccctgtcctggtaaaatatgatgtcactttcccattcagccttggttagctgttctatgagccaggcagagtagggatctgttcatatctatacttgcccccagggagtagcaacaatggactcatgatataagaactcagtgaccagtggtacctgccagtggcccacaaaattgtattgttgagctgacttcctccaagtttttggagggggtgggtggaaccagagctgggcctggttccactgcagagtgtgcaggtcactagaacaaccaggagaaggaaatctaatggctggatcacagttattgatgttacacctctgaccttttctcaaaacctttgcaaaccattgtttggatttgcaatactggaaactatcagcggaaggtcttgactgtgagcaaagataaagttatgaactctgggaactgcgctgtgccagaaaagtgcttcccaaggtttcatgtgcagacaaagcacctggggatcttgctaaaatgcagacactgattcgataggtctgaggtgagacctgatgctatgtttctaagcaacttttgggtgatcctgctggtccacggattactcctggaagagcaaggggcccaggctggagctggctcacgctggctaagactaacattctactcacttccttgcctcaacacacagaaggagcccagtgcctgttgggaatatccaaactctctaccttgcaagattccttcccagccagaccctacttcaccctccttccgccacctccccgcagctgtgctccaagcacaacaaatggccagatttatcccaggctagtcaagctctattccactagcccatccttaccagtgctggttcctctgcctaaaatgcccttcttcaaggctttggaagctcctactcatcttccgtcacactttccccagtacccgttctgcttctgttgcttgccacttgtatgcaaattacttcctctctctaagcctcagtttcctcatctataacttacagatagtaataatgtttaccccaaagggggttttctaaatattgaaggagatgatagacataaaatgcttagcaaagtgcctgagacattctaggtaattaaaacagtaaattgatgtaacttccctctgtgaaatctttctggaatttttccatttacctgatttttattgctcccacaaaatctgacttttacttctatggtggcccttatcactgaattttacaatggcctattggctctagactgtcttatctaataagttacaagcacctagaggtcaggttcatgttttacccacatctgctttctcgggatctagcccagagacaagtacagaatgaacactcagcaagtagaggccaggacagccacagccagtggcatttaggggtgctctgtatctaatggtggcataactcacggagcagtacagttaactggaagattcaggaaagcagtagctctatttaaatgagatgtccagataaacgatgatttcatatccaggtaagacattactctttatttactctttatttttaaaggatttaccaagattttcttaagtggattccatacttaaacagaacacagtggtctttatataatctttccaaaattgcttggggacacctaaaaggcattaatctttgcccccagagacagggcgactgaatacttggtttgtctgggaccattgttttgcactcattggctggtcctgttattcctagcatcccattttattcttttaaggtctcctagtttggacaagaaattatcaggtcaccctaaccagtgatagatgatactggatcaaagtaatggttcaaggaacccctgagatggttacatatatttgctatttgtaaatagcaaatttacaaatataaaatttttaaattttatatttaaaaatttaaaaatatagcacttttttaaaatgcagcacttcccattgaaagaaggagtctccgtcccttcccttgaatctaggcagctttatgacactttgaccaataacatatagcaaaagtgacctcctgcaagcttcgccaagaccttaagaaattggtgaattccacctcttgtgacttaggatgctcatgattagaactcagccaccatgctgtgaggaggcccaaggtatgttgtggagagcctcctgtaaaggggaccaagagcgagaaccctggcgccagccttgtcagtgggtcatcccggcagtttatcttcagcctcacttgagctgcttcagctgatgctgtgtggagtattgtgtgtcacttccaaaccctgctcaaattgcagatttgggaacaaagtaaatgatcgttgtttccagttattatttgaagagtatctttatgtaataacagatacttagttgcccagaaagaaaatcctgccagaaaattcagcattttggactggtagacacctgatatagagttgggaaagttcctggaacaaatgcttgctaccatcatcataagtatttatatatatatatatatatatatatatatatatatatacatacacacacacacacacatatatacatgtgtatatatatatatatatataaaactgtctttggtcagaaatgttttgctagggatttcgccagtttggtgacaacagggtttaccaaaaagtgttcaccgttcaccctaagataattagcagcaaacctagtaacaagatgagtcactctgagatggtgacatgaaggattttcataaattgctctgtcatcttccttctacataatcatgaccaagtaagtcattttacctcttgaatcaacaatcaaggtaatttgtctgtataaagaacatacacagcacaaccctttctggggaaattgatatttcagacccggagctcagagattttctcatatgtcaaccacatctttcagatgagagccccttaaacaggaagtttggaagagttcagctttagggcaaaaaagggaagtgaataaggagggagagagagatgggatgggaggggcaatgagggaaagagtctggaggaaacatgccccttacaaattccaccactcatgggtgtcccaatcattcatttgttcatttagcaatatgtctcgcctgccaaccatgtaccaggccctgggctgggagtggagcaactagcagtgttcaagacacacttgatccctgccctcacggatggggcccacagccagtgaggggaagaggccattaagtaagatgtggcagtaatagtgtgtgtgttgtgaaaagggaagtgaagggtggggaaccacttgtgggggtgaagggactggccaaactgggggtcagaaaaggactccctaaggaaatgacatagaagccaaaaccagaaggatgagtggggattagtcatcctttcctgccttcctcctcttcttgaattcacctctgtgcttagagtaaacgagtcctctgactttcatttgtacacacaatccttcctcctctcgtctcctgcactgagctttatcttacctgcactgcctttaaagaagtctctcttcactaaacctctgcctgaaacttcattgcttttagggtaaaaaccaaaggccttaacatggcttactaactctgtctgtcattggtaacttggcttcagccaccctgcattttcttcctgccacaggccctttgcatatcctgttccctctacctagaacactctcccttcctctgtttacctagttaacttctacttatccttcagatctcagatcacttattttctctggaaagcctccatgacctccctcaactcattaaaggctcctgtttttaaggtctcaaaacccatgtacccttcattcttagcagtcatgataggtgcaatttctatggtttgtatgataatttgaccaatgcctgtctccccagggagaccacaagccccagaggaacatgggcttgtctgccttgtttactgcttcattccagcaccagggtttaacatgaagaaacaacctaattaaatgttggaggcaaagtgctgacgccagagtattactacttccaaacccttgagaataaaaaaaaaaaatccactcagtaaactcatatatatcctctgaatcaagttcataatagcagttgtgacatgatgaggggggcagaaaaccaccatggagccaggagacctaagttagaatcccatgtctaattgccctttgggtctaagtttcctcatctgtgaaaaaggtgaaataacagcattctccccaacaactgcttagacttgcttcgcctaatgaaaccacttcaaggatgtatacttatgagttgattattgcccaatgtccactggggaatcaagaaaggccatcagtacaccaggccccactgttgtgtgcagactctgcatgggacaggaagcatcagctcttggactccccaagaagggcgtctgcaccagcctgggctaccatgggccctgcagtattgatcaccagtattgcagagggaacatttgcctttattcccctttcaaataattaaagtataatattttatggcctgataaaatttactgagacccttggcacgtaattatagtgcttctttaaaggagaccccataaaagatgcatgattagaaagttaaggatctggatagaattgcaacgatgtgacaaataatttacaagtgataaactgtctgagggggaagaaattccaataacctctgatgaaggctaacaattaaaataataaattccccaagatcaagggtaaaccttttttcttggtcaaagacttagactccacaggcccaggaacaagaacaaaccttcttgtcaaagtcaagtcctggtttctccggacatctgttctttatttctttatgtgtctatcttttgtatgtaggcatttacatatttaacttttttcttaatttatttatctactaattattcatttttatttatagccattctttcactccctcattctattaattcttccttccattcatctattcacctgccccatctatccatccttctatttatttattcatttatctctctattcatctattttcatctgttcgtttaaccctttattaatttactaatttatttatctatccattcatttacttttatttttcctcctctacttatttacccatccattcccatctacatgcattgctcacttgcggtaagcagattgttaactgtgtcctaaggcagtgccacccagtagaactataatgtgagccacacatgtaattttaaattttctagtagccatatttttaaaaataaaaaagaaataagtaaaatcaatttaaataataaagttactatgtaataattatttttgttattataaagtgagtattgtagcatagtatatatttattttaatataaaatacaaataccattaatatttaatacttttttcactcgttttatttaactcaacatattcaaaatcttatcatttcaacatgcaatcaatataaaaaacattgagttattttgcatgttttttgccctcagtctttgaaatccactgtgtattttgaacttgcagctcagctcaatccagaccagccatatataaagctctcaatagtaacatgtggctcatggctgccatgctggatagcacagctctaggacttcagagatgaatcagacatagcctttgcccttggatagtttacactagggtaaggatggagaacgtattagttcatttaatcttcatttaaggtataagtacatgatactcccattttacactagaataagccaaacctcagaaagaagcagtaaaaagttttggaatcaaataaattgagcctcttaaactactgtggcaaacactcaggcagagcttatgctgtgtagctatgaccaactgaagggaatcatctcaccttcccaagagctggcaagggccaggcatcaggcaagacaccactgggaagaaacaattgcatcagcttggaagtagggaggcagatacacaacagaggaggcctttccaggcaaagcagacaagcagagagagaggagaaggaactaatactcctcaaacatctgttatgcccaaaccagtccctgagttctccaaatatctctgcacagagactcgggatgtgaaagaatatatttcagagaataaaaaagcccacatggattataactagccttctgcatcaaaaattatagtgtcctatccattcataactaagagagctaggattctatggccaattaactacaaggcacccaagcctgaagagtatgatgatgatgacaacagtgataataatggtaatagcagttacaagagctcacatgactgagcattttctatcgtattccaagcacttcacctgcgctggttcattgatacacttattttagagatgaggaaactgaggcactttcccaaagccaccaacctactgagtgagtgttacttacatagacccccataaagagcactgaattggaaacagactcagccagataggatagaggctgcaggatggccacggagggtgtgaattaagtacccctggatcattgtttctaggaagtgcatagtcccctaaagaagaaaaacctatgaacaaataatgaccctaaagagttctaggtgctctgtttacaatagcaaagacttggaaccaacccaaatgcacatcattgagagactggatgaagaaaatgaggcacatatataccatggaatattatgcagccattagaaaaagaatgagttcatgtcttttgcagggacacggatgaagctggaaaccatcatcctcagcaaactaacagaggaacagaaaaccaaacactgcacgttctcactcgtaagtgggagttgaacaatgagaacacatgggcacagggagaggaacatcacacaccagggcttgtcagggggttggggacaaggggagggacagcattaagacaaatacctaatgcatactgggcttaaaacctagatgacacgttgatgggtgcagcaaaccaccatggcacatttatacctatgtaacaaaccagcacattctgcacatgtatcccacaacttaaagtaaaataaaaataaaaaagagttctaggtgctgagccagacatccatacacagtggagctcacatgtgaggggagctgtcacttctctttagggatgagagaggtggtcaggaagggtttcacaaaagagatgatgctcaagcatcataaagctttctctgattctcccaacaggaagtaatccctttcccttctacaagtaagccactttgttcaggtccttggagcctgggccccattgggccagtttcagccccctcctccttcctcacccagcacagcccgctcactctgtgattccctgcagacaccaggcaagctttacacttactcagcatggatcaatggagaaatacaatcacttggatttctgagaatgtatatatttgtttagaaacccctgtctttctcgggtacagacaaaacactgccggcttaccacctcccagagacgcactgtgggaatgatttaaaggctttgactgtcagtagcaatatcaatcagacgcgcttcccagcggcctctgcccaggaacagaagagacatcaggcaaaggggcggaaagagggacatagcactggaaccaaagtcaggtggagagagagagataaaggggagggggagagagaaagtgagaggcactaagaaaacacagggcaggggtgggagtgtgcaaaaaaagacaaaggctgggaaaaagctattcggagttagggagactgaaagagtcaggaaggggaagaaaataaaagagacagagacaaacatggccagactcgaagtaagtcaatcagacaccaagatacggatggggacaaaaatgatcaactaaggagggaaagagggagagcaagagagcagggacagacagaaagagaggagtgaaaggagacagggaagcatgtttctagcacgctggaccacaccagttcctccctgcctgcactctgctcagctgttccctctgcctggaaggctcttcccccagattcttgcatagctggcttttcctcccctttccagcctttgctgaactgacactacctcaaaaagttccccagtagccaccccaatggaaggaaggtctgccctgctcatccctacccattgttctgcatcagaaaagaacaccccactgatttcttttatagaactcatgtaaatatgttattttcttggctttttattattcacttggggccaccatggtcctggcatatccccatgatctagaacagtgtctgtgtctgacatagagcaggtggtgcttcataactgaagaacagatgagtgaatgaacaaatgaacaatagtaaaggtaaaatcattactgagccaaagcacttctctttgcctactcaggttactcaggttgtaatagtgcgatttggtggcagggttgggtgttgactggcagtgcacgcctgttctcagcagctgggcaaaggcggggctatctgtgatggaagcataggacaggagcctgcatctgtggatggagctaaagaagattctggggagactgtggggtggctggagagctgggaattttctacctgcagaggcccctctgcagttcctttcagacatgaatggttccatccatgatattgccttgtctaaagttgaaaatgaccctgtaggccaaagtgcatgattcccacatatatttcttgggcagccaaatttcctaacttaactaacgaggttcccaccagcctcattaggcctaagatggcttccccatcatgaaagctctttgtttctatgaaaagagctcttaggagccattgagcgagatcagctcctgctgatcaatgctgaagagcactcatggggaaccttccagtcaagatcagagtgctttggcctcccaaaaatccctagtaaaggccatttggctttctgaagccagacaaaaggcaattatatgcatttctatctttggaaaatgtatttgaggaatcagtggtgaggcctgaatgcaggagatgcagagagtctggactgcctggtgaaaaggatgctggccatgaaatcccaaagtcaggggacctcttcaggtcacttacagggtgactcagtccaaatagcactggaggcgatccacagcctgccacccatctcaaccctttcatttcgcctctgacctttctcttcttgcccatatttgttcttgcataaatttaacatagttacattcataaattccagttaatattctgctttctaggtaatgtataataaacatcttgtatgtttccatgagatctttgtcatcaacactgctgatgattacattggtgcaccatgatttcatttaccacacccttgtaaatgggcctttgagaattatctagggttttgctgttctagatattgatgtaacacacatcttttgcttatagctagtcctttcctcaagatcattttcacaccttgaatatcagggtgtgacaatatgttctcatattgtcccaaaagcttgtaagaatttggatggtcacaagcagtgcatgcatgattttcattccaacctcaccagcattggtcattaataacatttttttcttaaatgattaacgtaaatcattttaatctccttggttagaactaagaattaacatttttgaaaatgtttgtttaatttttacataatttcatatgtgaatttttgtttagagatttgctcagcccatcccattcctatctgcatctgtaaatttagggtgtaagtcaccatccatggccacctctgaagaataaagaatgatatattcagggggtaaagttataaactgtgggcagtactcaaagcttcaaatcaagtccttgcaatggagtaggggcagcctcattaacaaggacagccacactttccccagtcaagtcttgatataccacaggactaagccagtgggtcataatatttatgcactctgtgcctcaggcactgtgctaagcactttacatatatatttcacttaatctttacaaggtcactgagatgtagacattagaatttccattttacagatggagctgaaataagtaaagtaattgccccaacatcacccagcctagtgaagattcaaacccagatctgtggatccataaagctatgatgtaaccactgcattagcttctgaataaataaaaaaaaaaatcaaaggggttaaaaaattgaaaaacatgatactgtctctaccctacatgtgatcaccagtctcctgaatagataagtagggagagccacaaagccatgtgacctatgtcattacaggtctttgaggtcaggaagccatgaggacagaggtgagaatccctcactgaggagctgaggaaggcttcatggagaaggccatgtcccatggagtactgaagcatgaatgagaatttgcctcatggacaagagttgggctgaagagagaaaggagggctgagagccgggtctcgccaagaatgtgtgcccgcaggttggcaggacttacgagtaactacagaaggtaagttttggactcgaatagacctggttttgaatcctgcttcttcttgctagctatgtgattagataatcatttcagtctctgagcctcagtttgcccatctgcaaaacaggcacgattgtttcaccagttgttgtggagactgaagagcatatggcagtgatgtgctcaggctggtacctggcagagaatcactgtgctgccatccctaaggacctcccacttttcttgtgcctcatcttctgcttctataagcaaacctgagagcgtgtcccatgagaagtggcctccaaggacacacagctgggagcacatattttctgcccaaaggaagcaaccagagtgcagtgaaaatcacctggtcttggatttagctacacttggttttgcaccccatttataccacttactagcttggacctcagaatgtggacaagttacttacctccattgaggctcagttttatcatctgtgaaatggggacagtcagccctgtctcacaggtaataggacacatgggcccagtatcctggacataatatacatcagtgtgcaatagaaggtccccaaaaccccacctccttataatcaacacatgtgggcactgactgcaatggcctacaagagatgtccatgattatgttcatctacagcccccatctagggacatccccaaaggcccctggggcccttcaaccttcagggtgcccagcctggcagggcctatgagcagtagctgtgcctctgccccggagaccaacttctccacatccccccccagctattgcgggaagaggcatgactcattcgagggaagagggttggcaccttctcccccagccgcatggggccagccagcaggcctgtggttaaaggacctgcctggattgcaaaacaagccagtttgctgcattctggggtcacgtgatgcagccgggcgctgtggatggccttttcttccctcgcccactgactcactgcatgcttgcttgcaatcacatgggctccctgggcctcagctcccccaagtgttctcgttgctgagctcatttggagaagaactaaattggaaggactacttccttttttcccttttttattgcaccatgactatataaatatattctcattatgaaaaaagtgtaaagactatcaaatatagaaatatagaaatgggaaaccacccctcaggccctaccacatggcctctgcagttgtaaatatggttaatattttcctgagtgtcttcaagggctctgtcttattttttaattaatgttagtttacacaagaaactaacattcctccttttagaaatattagaatattactaagaaggcaggagtcctccttgacgctgtcatctccaatcccatccagagacaaccactattatcagttaagtgtttctccttcaatctctattctttgtgtggtgtgtatagattacatatatgtacagattacatatagagaaacaggagtgctgagagccgggtctcgctgagagtgtgtgcccgcaggttgacaggacttacgagtaactacagaaggtaagttttggactcaaatagacctggttttgaatcctgcttctttttgctagctatgtgattaaataatcatttcagtctctgagcctcagtctcatactctcataagaaaggctaggtgtgggggacatttctatacttattttcccaactgtatgtatgtatgtttgcataacttgtatgtatgtttccgtaacttgttttttcacacatcagaatgtctcagagattttccacattgttacacagaggagccacaatttcttttaatggctgcttagtatctaatactataaatgtgccataccttttaattgttgtcaggtagtgactttaaagttgtctccatttttttctctattcacaagcaatactacgatgaatattttcctataatccttctttgcccacatgcaggtattttttgaaggttgacaccaaggagtagaatctctaaatcatagctgcacatgtttgggttcaatagataccattgcatggccctcccaagaaaacagttcctattctcttcctaagtatctacaaatatgcatccgtgtgcacatgggaattcactttccaagagttcatggtaaaatggtcaagaggaagactgagaaatacaaagaatttcttctccccaggactgaaagtcctgttgagggacagcatagagagtaaggaagtgccacagagcatttaaactagatggaaagtatccaccattgactacaaactcactatagagatggagaaattgaggcctctcaaaaggaattgacttgccgagattcagctcccagtcccttcttgccaggcttactctcagcagttacaatgaagcatacccccttgtgtaggagccagaaggatagtttccaaattcaaacatgattatgtcccctcctgtgcttaaaatatttcagtagctaattgtgctccaacttcaagacaccacccagacttttttcactgttctccggacagacccaggatctcttcggcccagggcctttgcatatgcttttggtgctctctggactatttcttgctcctgcctctccacactctcacatcttgctaactcctactcattcttttaagagggagtgttcttgctatgtttcccaggctggtctcaaacttctggccttaagcgatcttcctgcctcagcctcccaagtagctgggattagaggtgcaagccactgtccccagcccctactcatttttgagatcccagatgaaacattccctctgcagggaagccaccttatcctccttgaacaaaccagagccctctcattatgtctcttatcatctcacacttctccttcagagcactgttcacaggttccatttacatttatgtgtggaatacagcaaattctcacttaacatcatcaataggccctcagaaactgtgacattaagcaaaatgacctactgcatgccataggaacttacttcttgtttatatcaattagcttatgggaaaatgattttgttatatagcacattctttgacttaaagtcacagtttctgagaacttatcaacaatgttaaatgaagacttatcatacttaaaaaatatgtgactcaccttctgagtctacaggctatatttctttctactgggtccccagcctttagcccagagtagatctcagtattatcttaatggatgaataaatgaaggagtagctttactcctcttcccttaccctgtgaccttgtggtctcactcctcacatctctccctgaggctttccctttgtcatcagagctgaggagacagccttgaaaagttcataccttcaggagacaaggcggctgtctgaaagtcactggggcttcagaatcagccatgcctgatttcaaagcccattcagccacttggattctgacatgtcacttttgtccactgagactgtttcctcatctgtaaaatggagcagcagcccctgtcttgcaggattgtgtaaggcatgagcacaggccctagcccagtcagctacctattgtgggtgttcaatgctggaggaagccccagagacacccccttctcatcatcaccatactgtgatctgaagcaggtttccatgcttatgataatacaatgttaacactccccatgtattcagatctttgccttgaatctaggaggtgagttcagctctagcatctgatggaaccaaccagtagccaccagatgcagatgctaagggccaacatgggatgagaaatggtatttccagatccctggaagaaaagttggtcataagaggagatggaggggtatttcctgagctccagcttcaggaatcagtaagggaggctgggggaacattctgcagcctttgcaaggggcacatatgtagtttcagagctgggaccatgatcaagaagtcaggaacaccccagaacttcatacactgctccttttgtttctttcttacccatggatgtggacctatgccttaaatcagcattgtttctggacttcatcatttgtcaagtattcactaatgccaggtccccgacaggtactagagattccctggtgggcaaggcagacatggcccctgccctcccaaagctgccaggccagtgtcttggccttagcagcagcaaggaaagggagctagagggctggtggcctgctttgccaggtctgggtaataggaggccttctcgacaaagaggtgctaagggatattccaggggagcaagaagtagcctgcagtctgatcttgacaaacaagcagccaacctgctatgggtcaggaggtgtctgctctctagccctcggcagggtcgtctggacagctctcagcctttcacccttctccagttaagggagcaaaagcagttagtctcctgaagtcaaaaattgtaattaatgaattaccatacaacagaactgttcttattttattttattttgacagggtctcactctgtcacccagcaggaatgtagtggcatgatcactgctcactgcagccttggcctcccaagctcaggcgatcttcccacctcagcctcccatgtagctgggaccacaagaacccactaccacatccatctaattttttgtatttttttgtagaggtgggttttctccatattgcccaggcttgtctcaaactcctggcctcaagcaatcctctcacctcagcctcccgaagtgctagaattgcaggtgtgagccaccattccccgtcttgttctgtttctatattgtgtccctaggatctagcacagtgactaccgtaagaaatacttggaggaaagaaaaaaagaaaggaggaagggaaaagagaaggagggagaaagggagggagggagagaaggagggagggaggagaaaggaagggaggaaagaagaaaggaagagaaagggaaggaagggaggaagagaggagaagcagggaggaaagaaggaggaaggaagggaaagaggaagggagggagggaggaggaaaggaagagagcgagggattctgtgaatgtcctacattcattcactcactgatttatttacccaactttcactggccacttctcatgtactagactatagagatatcaacaaagcaggggtagtccctgccatcatgagtctgcgttctggcgcctgcagggagagcacactgaaagcagcatctttttgtgcctcctgtagaacagcagccccaaaaaatgctgagccaaatgctccactgtcaaacaagcttgaatctgcgcgcccctgcttcccttcttggattgacacatcagaatatcaaagattctgagaagttttgcaataaaaaatgcataattaaccaggtctgttccaaactttttcagcctgaaacctgctttttctcagattgacatcccaggatcttaaaggaatcaggcgagatcgcctccctcttggcccagggtgtgagcctccctgtcctgttaggccaagtttctcctcacccagagcttattcccgacagcacgccctgtggaggggccctgccgccacaatttccgaagcctgggtttcttggcacctaagggactgctgccctgacagtgctccagcaaaccatgcctgtgccatcttgcccccacatgtgctggagtcatggagatacctcctgttgttctatccctgagacttgaggacaggaagaagcagcaggagaaaccacaaggggccggactctgattggaacagcaggagggctggaggcctggcctgacctgcaggcctgcacgatgatgccagagccccaggttttggcagagcctgaatcctgcttgccaagggaatttggaaactgccaaacccctgtgcagatgaagacaaatatcagcctcgtgtttctgattcacttaggctcagctcatcaaagtgctatttggtgaaagctgcttacatctcaacaagtcaaaggacctcctgtggaattgtgatttagctttgtccaaagatctcttggccacggcggaaggattcaagtcatgcctctcccacttcaggaagaactgtagccactagatatgctttgagaaatgtacttcacttttctgagcctcggtttcctcaattataaactgggaggtggtaccaacctggaagaattcctgtgaagattaaataattgaatgcattatttaaacccctaacacttcattagtgctgtataaaatggtgtatattattaataatagtattatgattattatcagcatctgcaccaccacctttatatgagtcagtgaatctgcagttattaagtctgaaatgttgcataggctattgagatagactgtcatagccatgacccacaatgacacccccttctcagaatccatgcccttctgtagtctcctccccaacagtgaccctagacttggacgtgtgacttgttttggccaatgagacatctgccctgagactgctttgcctataggaaggttagggtgacccatgccttggagagaggcccagaaatccccagccatcccagctgaatccaggtcccaactgaagagaaccatatgatgaacccagaggaaaccggcagaaaacccgcccagcctaataagttgctgtcctatgccactaagttttggggctgtattgtgcacagcgcaaatacctggtatgactatttagtttacagctggtccatcttcttacccattcatctcttcctttgctagtcacaggactttttcttgttcaactagactcctcagatgggagaaatgtagagcccggaggctggttggaagaaattatatgtttattatcttaattcgaatcagccaccaccccaggccacctcaaatagactcacagattacagatgaacctgcccctcaatgcaattagcacgcccttctcaggacagctggccacttagagccctgtggctgccattagaaccaaaatacaagtgaattcaaagtgattccagacactccatgaatacaggctacttactgggaaggaacaccagtctgaaaatctgaaagaggaaaagtgaaatgcattcgaaaaaaaaaactaactacagttttattgttccacaacacatactgtaactcacactaaacactgaaatgttaccaccaactggtccctgggtggctctgatgagtgaagtggcttggtttgcaattggcatattaattgtttgaatgcaaacaagttcctctaaagtatctgaagctgttcggtgaagagttgattctcttaaacacttcaatattaatactgcaaacatttaccctgtgggtgggagcaatgactcagggaaataaatctcacatctttgccttcagccaggtcttcctccaagacttcagatctatagtaaccacgtgtttatggaaagcagcccctggaatggatttaacagtgatagcttgcgtgtgccaatcgctgtgctaaccactactcatttaattctcaccaccactctatgagacaggcattgcttgtctccccactttacagaggaaggaaaggcagctcagaggggttaagtgactcgttcaaggttatgaagttgtgtgactccaagttccacactgtgacttcccccagccccactctgcctccccatcttgcctcctgtgtttcttttttcagtgcctatgtccattgtaggtccatccataggtccaagccacacaccttccaaaagacctcttgaaaatctctcaaacatggccactctctgcacccactgtgccatgattgccatcccagataatcacaatgtcccctaactggtctctctccctccatgttgtcttcctccaattcattctcttaaccacagctggagtctgtctaccccaagcctgagctccggagcttaaaccccacacggcagaaggagcagaattttccaaagatagtcaggagggtagctgggtgcaatgttggaaaaatggggatgtgtaggcagggacagaaaccgagggaggaaagcaaggttcagaaaggaagaggtgtctgtagagatcactttccatatgcaggaaaagcacaagagaaagtcgaggttaatcatctctccaatctttgttccttctctgcaataatttacctctgagattggcctgactctctaataaagaactttgaagtgtgcagaaaaaatccgcacacaaaaaccgtggtgaaaaaggccctgcagaatctggaccctacaggctagaggattcccagccagattcttacacatacaccctcctttaaaaacacctctatatccatataaaagtccccaaataccccatgctctcttccaccttggggcctttgcacaggcagtttccagaatccacagttctcttctttctcatgagtccctctactagccaattcctacttatctttcagactcccatttatacatcagttccttctaaaaatgttgcctgagcctcaggtcccaattaggtgccctcaaaaaatatcttccttgctaacttcccctcattaactgtcatttgttatacttgtttctattgatggtgatgctaataactattgataaatgaataaatgagtgatgtgtttgcaaccccagtttggacttgcccaatctgtgagcctgggtcaaagcggtgctatgggccccagggcatgccatgtcagaaacagacaaacctctgtctagggaaacatactctgcctcaaagttgagtaagaacttgtatctaaaaagaggcctttggcttcttgggctcagctgtggaacatgcttggaacacagcagtgaagggagacatgaagacagcataggaagaggcagaagtgagggaaataaggattaaccaggaccagggttaaccagaagtaagggttaacaagggaagccacttccattttcagtgggtgttcaaggcaggcagccttcggttcaaattttatgttctactgggtcgtgagaactatccatttttttgtttgttttttgtttttgtgtttgttttttgagatggagtctcactctgtcgcccaggctggagtgcatttgtgggacctcggctcaccgcaacctctgccttccagattcaagcaattctcctgcctcagcctcccaagtatctaggattacaggtgcctgccaccgtgcctggctaattttttgtatttttaatagagatggggtttcaccatgttagccaggctggtctcgaactcctgacctcaggtgatctgcagccctggccaaggactattcattgttattggtaaccagaggccttctttctattttgtgaacatgccaagttctcttccctgcctcatggcctttgcacctgcttttccctgcacctggaatgccctcccccaggtccttgcagggctggcgcctcgtcactcagatctcatttcaaacatcaccccctcagagatatcccctcagagatacatctcctcatgtatcccctcagagatacatctcctcatgtatcccctcagagatacatctcctaacccacctcctcacgttcccctcacccagtcattctctaccttacaaccctgcttgattttcttcatggcaccagccgatgtcttaagtaatcctatgtgtgtatttattctgtgcctctcccgctctaatgcaagattcgcaaagccaggactgtatctgcttgtttgctgctctatctcccatgcctggcacacaccaaaactcaataggtagttattgaatcaatgaataaatgattttaataaataaatgagtaaaagacgccagagtgaagtcccagcccttgggagcagaaggtaagaaaggtaaaagcagaaattaagtaacaatgcagggacccaaggcaacccagtgatctcactttggtagcaaaacccactccagagccaccagtgatttcctaatacacagtctgcccttcaaataggaggtgtcctgagcctgctgctaaacagagcagggcagtgtcttcagcctctgcaccaggggctcagaaataagcttctagtttgctggttctcaaactacctcaaggctccacccattccctcccttgcatccctcgcccagctccttcttcagcctgatgtgtccatctgcaccaatgacccagagggatgaaaaaacagcctgattttctttttttttttttttaattatactttaagttctagggtacatgtgcacaacgtgcaggtttgatacataggcatacatatgccatgttggtttgctacacccatcaactcatcatttacattaggtatttctcctaatgctatccctcccccaggcccccaccccctgacaggccccggtgtgtgatgttccccttcctgtgtccaagtgatctcattgttcaatttccacctatgagtgagagcatgcggtgtttggttttctgtccttgtgatagtttgctgagaatgatggtttccagcttcatccacatccctgcaaaggacatgaactcatccttttttatggctgcatagcattccatggtgtatatgtgccacattttcttaatccagtctatcattgatggacatttgggttggttccaagtctttgctattgtgaatagtgcctcaataaacatacgtgtgcatgtgcctttatagtagcatgatttataatcatttgggtatatacccagtaatgggattgctgggtcaaatggtaatgctagttctagatccttgaggaatcaccacaccgtcttccacaatggttgaaccaatttacactcccactaacagagtaaaagcgttcctatttctccacatcctctacagcatgtgttgtttcctgactttttaatgatttccattctaactggagtgagatggtatctcattgtggttttgatttgcatttctctgatgaccagtgatgatgagcattttttcatgtgtctgttggctgcatagatgacttcttttgagaagtgtctgttcatatcctttgcccactttttgatgggattgtttgtttttttccttaaatttgtttgagttctttgtagattctagatattagccctttgtcagatgggtagattgcaaaaattttctcccattctgtaggttgcctgttcactctgatggtagtttcttttgctgtgcagaagctctttagtttaattagatcccatttgtctattttggcttttgttgccattgcttttggtgttttagtcatgaagtacttgcccgtgcctatgtcctgaatggtattgcctaggttttcttctagggtttttatggttttagggctaatatttaagtctttaatccatcttgaattaatttttgtataagatgtaaggaagggatccagtttcagctttctatatatggctagccagttttcccagcaccacttattaaataaggaatcctttccccattgcttgtttttgtcaggtttgtcaaagatcagatggttgtagatgtgtggcattatttctgaggcctctgttctgttccattagtctatatatctgctttggtaccagtaccatgctgaaaaacagcctggttttctaagaaatgattgttaatcttgcatatcaactttggagaaacgacgtcccattcttcagcctcaaaggtaggagagtaatcacatgtcttcagaatgctgtgaaagggaaaccactgggcagctagaaaccacatggtgggtaggttgagtgtacaggcccttttttatacctgtgctcattgtggcactagtcacaataaccaaaaggtgaaagcaaacccgatgcccatccacagatgaacagataagtaaaatgtggcgtatacacagaatggaatattattcagcctaaaaaaaggagaaaattcttacgcatgctactacatggataaaacttaaggtcaaaatgctaggtgaaattagacagtcacaaaagtatccataccaaatgattccacttacatgaggttcctagagtagtcaagttcatagagacagaaactagaaaggtaattgccaggagttggtggggaaggagaataaagagtttttgtttaacaggtacaatgctttagttttgcaagatgaaaagagttctgaagatggatggtggtgatggccgcacaacagtgtgaatgcccttaatgccactgaactgtatacttagaaatggttacgatggcaaagtttattttatatggtcaagatgacaaattttatgttatgtgtattttaccacaattttttaaatgttttattattttaagttttgtggttttgttttctttaatgcaagctccggaatcagacacacctaggtttgactcctggttctactttttcgcttgtgatcttggacaaatttcctatctgctctatcagccaggatgcagtcagtccaaaatatggaaagcactccagacatccccagcagaaggaaatttaattcagaaaattgggtgcttataaaacgtttggaagagttggaggagaaaggatcagagtctgtccctagtgttcaggttttctggctgtgcttcagaaactcagcaatttcctcctgacgcagaagtcaggaggttccaggaagccactgctgaccctcacagctgccatactttcaggtcagggcaggtgacaagcagggctcacagcagttcacatgtctgccatcactgcttgaggagaaagaatggcttctgggcccctcttcttccaaatcttgcacaagtccatctcactggcaagaaaactgatcacatctagaactctagaggcaagggaatctcagcagaaggtggtttctgggcttctggtcactgagattcagggcagagcataggagatgagaataaaaagcagaccatcaaaaaatatgtcatgtatacctccctggccccaggttttctcatctcttccatgaggatattaataaccctcatttggagtgttattgggattaaatgaaataatgcatgaaaagagcttagcagagttctcagatatccctaagtctttcctgcctcaggtctgtcccatgttatcccctctaccaggaacactctcccttcaatgctggctacttctactcacactccttgtctcaggtgagctgtcatttccttagggattccttctaaattaaggctcactttgcattgtcactctgttacagtatttcaaagaatcttgtgcttttccttcatggcacttagaacaatttgcacttatgtaatttaagattatgtatttaagatctgttttctctcaactgtgaacttcccaaggtcagggacatcagggactcctccttcctattcttaggtggtcgcacctggcagaaacagcttcagttctggatgacagccctgcaaggccactcagccccagctctcacctctgcagctggaaagacagagatccagcaaggtgagggacatatttagagaaccataggccttgcatcacccacatcatgttcagccctggccagaggacagggagaggcagggagaggacaggaaggtgagtggcttcttgctggctggctcagagagtcctcctgctggctcctgccacagtccagagcaggcagagatccctcaccagcctctggctctcttctactgggctgcagtgcctgcacagcaggaatcctagcctggccacgctctggcctggactggtggattcagagcattggacttctcatgtgggaatgaccactttccagtttttatgcctgaagaaggggcagacaccaccagacactgaccccaccccacccctcataatcagaaggtgtgacttgagcttctcaaggcctcagttttcttatctttaaaatgggaatcataaaagccacttgaagtcaatgagaggagcaccagtcagaaacacatggcagagggctcaggaaatggtcccctcatctcacatcattctcctaccaaccccatccccatgggttaatgctctctcatccctcttaccccaagagcttccccctggcgcccatagaggcattcaggacctctcacctcaggaggcagctgaccctggccacccacccccagccaccacacagctcctgagtgtcagtcaacctcagcctattgatggcttcctacaatgtcccaggcctagacctatgaagtatgacccacactttcctgtaggcaactcccggagtccaaggaacttccctattcacaactcagagcagctccaggaccaaccaaagggaggagtctctgtttgatagacaaggctacatctcagacacactaagacacatgcctgaagggactcagctgcgtagtggagccagaacacctgttttctcttcttctcagctgcccttctactcatgagtctctgtgtaaccagcatatgatagcatagggagggagagagcaagtcagggaactgaggagcctcccaaaagaagcaacatgtatgaaattatgtactattgcttccttcctccctctgtccctctctcccttccttcttttctttctttctttcctctttccttcctttcctcctcccttccttccccttttccttccttcctttcccttttcctcccttccattctttttttcttctttccgtacctccttccctacttctcagtctgattgtctgtgcctccctctgcctacggacctgtaagcctgtctctctctgtcagtcagcatgtccctttccctcctgtgagctggctgatagtcagcctctggcccctggaagccatgtcaaatcccaaggaggggcaacgtctggtccaggccattatctgggtcataagaggccttgctctcagaaaatgatcatcccattttggaaggaaaccaggctttcacttgtatccagggcaaaacaggccagaagcctgagtctagaagcacccaaaacagacacacaccttctgcctaggcttccaggaccaatcagtgttggcaagacaagtgggatatcggcaggtcaggtgtgaccattcagaacagagcttcagtgaggtgtggctcaaggaaaagcagaagtgggtgctcagaccaaatggcatcactaatgccaattagggaaatgggcccattatcactatggagtcatcactatcacaggcatgcacccctggacacccaccaggatgcaaccattaaatgcccacccctccctgctcctcctactcttcccacacccgctggggatgagggctgttcctctgcctgtacatttactcaggtagagctctctgagacagagctctgtgcaacttgggaaagggctgccttgagaagtggtgttccccatcttgggagatattcaagagaggaatgaatttgtaagtctgggatagagaggattatcattgaacagtctttttaagctaagacttaagaatcctcaagaaggacactaatttttattacattatataatcacaattcccaccttaatgaagtgggcaccatgattcagacagactaaaaggtatagggatttgaggcacagggtttgaagtctcaaagtcatatcattgtgactccaaagatgcttgactttgttcttccaaacttcattcaaaagagacatatggctgcttggagtttaagagcccaagctcaggatccagaaatatcttgattagaatctaccattcatcacctgtgtatctttgaataagtcatgtcaccctgtcagcctcagattccatatggggaaaaaagcctgtctcatcatggtgaagaatacgtgaaattatgactatctggtccttagccagctttttggcacttagcaactgttcaataaatagtttgttgtatttgtgatacaatggcaaatccgagagtttggccccagagagaaatcaagagttaacaatggtgggtgacattccccatggccacatgacccagaaaatatgagtcttggcttaagcctaagtaggcattgccagagcctctgttcccaccctgcttttccatgacacaatgcaccttctctggtctcaatccccagtttctccactctgccctgggccagcaacccaggtctcccactctactctagacttgaaataaatcctttaaccattaagtacttaacatcatgttttctgccttcagaagtttctaaacagtaattaggcagtggaacaccctgccagggtggctagagtaaatatcattagtgtgggagggagtatggggtaagtggatgagcagggactcctagcacatggcagggactggctgacattggaatgaccaaagcctggtggagcagctccattgcccaacctccactgcttcaccctccctcttgggggaacctagctctgaagctataaggaccggtgatactatggagagagcactggctttagcatcagaaaaacctgactttaaaatccatccctgccatggtgaatatggacaaggtatctgaccactctatgctcatttcctcacctacaaaatggggaatatcctatcaacctcttagtgtactggtaagtattgaacgagatcatgcatgtgaagtatagagctactactctaatgggcccatgggggcatagattcaaaagtcacagtgtaaggtggcaatcatgtatacccaaaattcccctttaaaaatctctgtatcagtcaggatgggttgggttatgctgctatgacaagcaggcccaaagatttcagctgaaaccatgaaggtttctctctcattcagtgctgcatgtttctcatgcaggcaggtagagagactctgttagctacactcactcaggatccagggcctacaaagcagccatcagtggtcaccatgccagaaagaaagacagctctggagattcttgcactggcaattacaaacttcaaccctatagtggggcatatcatttctgctcacaacctactggttagaacctgattaaaacctgtcgcatggccccacttgagctaaaagttgttcagtcttctatgtccacagacagagaaaaggacagggagctggcgagtattatgaatcaccatcctaggatccctatgggagactcgcacacatttctcaatctgtccacaaggccagattgtctctctagcattggaacaaatcaccattgcttcccttaagcacttacagaataaaatagatgtatgcttcgggcaatgttgcatggaaatattaaaatccttaaccccagaatcacacctgatgcttcaaggcactcatacataaagaggcacgtgaatgcccagttggaagattcactttccccacaccacatgctctctctgtgcctaccctcactgaatagaataatggtcagaattatctctgtatttacatttttgtttcctctctttctttttgtttcaaagctgaaatgtgtaagttgaatgcctgtaagatagaaagccctatactaatacaactttctgggattcagctgcccctcatggcagaaagaaaagagttccctaaggctgtcctcattaagtccccagcctgagacccatccttctaaggcctctaatgtctctccttcagcacctatgacacgcctcattccttctctcctgttcttttccttctacaacacaactgcttcagagaaatttagtcccagcttcatcaaagtccataataaacacttaatgaaccagcctcctggtgagaggaccatttggctagtcacccagctgacaggacagaagataggcttgatgctcagagactcaaactttctgtggcatcccttagaatccaacttcccaggcccctggtcagctaaagtgctgtgtgtttcagaaccttggttctgaaggtcctttggagccaggagccagaacccagcttgaggtggagtaagtttcaggtagcttgaagcaggccaagtttctggctgtaaggtagtacaagtcatattttacaaatagtgacatatgtagtgtgtgtgtgcctcaatgtccttatctacaaaataatcataacaggtaccagacacagttgcttatccccctaagcaatgacttgagtcttacattggaagtcaaaattcaatggaagaaagtaaacatttattgagcacctactatgtgccaagcacatgacatggggtttgtatgtgttacttcataattttcacaactttcaaaggaaggcactcttttccattttacggatgaagaatctaaagctctgagaggtgcagtgactcattaaggccagtggtatttggagttgagtcctggtttcctgcctcaaaaggccatatgtcctcctctctgtgctcttgaatgcaccctgggaaagaagttattattgcctccacctagatttcaagccaagcaggcaggaacaatggattgagaaagagggcagtgctcccaggttggtctttggcgatcagagtctatgtgggaagtagccaggaaagctgggaaagtggataagcctcacccagttgcttgttctgagtccattggtctatgtcttcagaaaaaggcttccaagcctggacttgtaattaattacaggtgcaattaacctactgcgcacatagattgggtgccaaggcattgagtatccatgtgttctgtgcctgatgccttctttcatgaccaccttgacaaatgagtggacgctggtcaacaggcaaagctatttcccctgcctgttccaccctgaaatagcttgggcattcatcccttcttccctgtctccctgttcacaacaattcaggtctcacgtgcacaggcttttgcaacagtttcctgactgattttcgggctacaagcctctctctccgtcccacccaattttcccacaggccatctgagccatcttcttaaaatgcaaacctgatcccatcttatccaaattaaaaacaagcaaaaaaaaaatcctccgtagattccatgactctcgggatcaagtccagattcctacacattggcctcaaggccactcacactccagtggcttttaagttctccaatcttatctccctgctttcttcttcatgcacatccccagctctgttcacatctaattgccctctcatgtcttcttttttgcctccatacctttgacaaggtcctctttaccaggatggcccttctcccacttcttgtcttagagaaaccccatttaacattaacaagaaaaagaattactaaaatgtgagcattcaggatcttccttccctccccactccacttccttaggaggcagaaccagggctccagtcttcataaagataccatagaatgcagagactgagtcccctatttaacaaagagctgagacataggtaatatggggaagatatattttttaaaatacaagagagctgagcatcagagagtcttgtggcattaatagttgagattggaaaataggaggaacttcaggcgctcccacctagaggatactgagtgagggagctataagaagacagtatttataagagtagcccgtccccatttaacacttccttcagaaactgaatcaaagcttgaatcacttccaacaatcacatttgcctctttttactatctcttcggctacaccgaaatcagactgagccacatgggatatgtcaagaattatttaggttacacattctttagagtttaaattgaagctcttaaagcttgcctgaccaccttccctgacccagcagaattagtcactcctctctgtagccagagcacttcatacagacctttgttttaagtcttaacattgggatattttatttgactatatattttctctgtcatcagtccttgagatcctgagagatcagggatagctatgtcttcaccgtctctcaatgtccagtttccagaacaagtcttgacatagaaaaagtagcaattgattcttgttgaatatgcgactaaagagtaagctatcttgtgaagtcttcaccaagctgacccagcacctgggtctcactctggtcagaccaggacaggagactccactacagagaggtcagcctcactcctagatgccactgctttcagttttggtcctgaccacttccagttgagatggaaaacagaaatttgtttgttttaaagtgtctgaatatttagaaccacaaagaggagttgtccagtttgattctaaaaatgtgccttgtgcctcttcttcttctcattgcccaggttcaaccaggcctagcaaaaatttgctcaaccttcaccttgcctgggaaatggaattttagtagggactttgccacattcatgcatgcaggcaactgtgcgaggtctacaaagaaaataacttccaataccaagcacccttctagcagtcacacttcatgctatccctaagtttgggaagattttatcttatgaatctgtcttctcccacatgggcctctggctttgtccaagtgttggaaagaccacaaaaacacacttccccttcctttgctgaattgaggggctggtccctgggatagtgcgtgaagcccaaggtggcagcacaaagagctggaaatcaggcaatttctttcatccctcaatcctcagaggaatagacctcagctccctcttcaacctcaaatgatgccaaataaaaaggaaaagttggaaacgtacccacaggagaactcactccatagacagtatgagcctcctagagaaatagatgcccaggaagtttgaatgaatgcagtgagattgtgcattcctgaaggaaagagacaacaaaatcaccaccaaagggaggagatggaaatggccctccctttttctatgccagtctttccttcagagtgtctacttttccagggtctctccttctaccttatgagaacttgtgtataccctggaggaagagaacagaagggaagcttgaggctgttccttggttacactcagattgcactcaactagcccaagtaggactagttgaagcccagaattcgctgtgttcatgcgccagacaactatgaggttttgaccccaaattggacttcagcacttgatagtcaagtgactgtaggcattactccacctcccagagccacagcttctttaaaatatctatttcaatggcttgctctgggagggatgtgatgagatcatacatccaaaatgcctggcagatagtgagaccttggtaattgttagttgttgttgttgttgttactattactattaaaaacacaagcatgcttcattagggagactctgcaccacaccattcatataagggctagatgcccttatatgaatcttcatagcaccatgaacatcctcctttgtagctttccccacacctgtaattcctgctcaggatctgttgtcccatgagtggctcatagaccacattcatcttgttccccaccatctcgagtgtctagaatcacagtaaatgctcaaaaagtattttcaatttaatttattcccattctacccattcccacctcagcttctcttctctgaagttttttacctccctacccctgtccctcttggagtgtccagataatccttccatcttgttcatctctaccacctcccctgcagtggacccatagtccaatccagagctctgctcaatgtccttggagtctgagagggaaataacacagactctgcactgtgccctgaaatattcagaagaaaagcattgtctttctaattgccaggggatttttgtactggattctaagacttctggaattttttgccctcggatttggatactatcaaacaataaaggtgcaattttttgttaaagtttattgatggaattataaatttatatcaacgcagtacatgtgtaaacttgagaatctggagtgcttctacttgccatgctctgtgcattgtcttatttactcttgacattggttctgtgttgaggtcaacattattgttttgtctattttacagctgaaactcagagacgttaagtcatttgcccaaagatacccagtttgtaaatggcagtcctgggattggaagagactctgaatccacgtgccttttttttttttttttaagacagagtctcactctattgcccaggcttgagtgcagtggcatgatcgcagttcactgcagcctccacctcctatgtcgcagcctccacctcctatgtctcagcctccaaagtagctgggaccacaggcgtgcaccaccacaactgactaatttctgtatttttagtggagatagggtttggtttcaccatgttggccaggctaattgcttttcttttcctttaaagagacagttgcttttttaaaaaaaaatcttattttaggttcaggggtacatgggcaggtttgttatgtaggtaaacttggatcacaggagtctgatgtacagagattatttcatcacccaggtattaagcccagtacccaatagttatttttcctgctcctcttcctcctcccacactccaccctcaggcaggctccagggcctgttgttctcctctttgtatccatgtgttctcatcattcggttctcacttacaagtgagaacatgaagcatttggtcttctttcctgcattagtttgctaaggataaaggccttcagctccattcatgttccctcaaaggacatgatatcattcttttttatgactgtgtagaattccatggtatatacatatcacattttctttatccagttttctaatgataagcatttatgttgattccatgcctttgctattgtgaaaattgctgcaatgaacatacatgtgcatgtgtctttatggtagaacaatttgtattcctttgggtacatacccagtaatgggattgttgggttgaatggtagtttgggttttagctctttaaggaattgccacactgctttccacaatggttgaactaatttacactcccaccaacagtgtataagaggttttttttttctccattgatccacactcttaattccatgctgtactgtccccaaggataaatgagtcaatgtgtatcccaaaaaaaaaaaagaggaattggccctaaccacataccccatccctcctgaccaaaggaagttgagaggtgggcccgttgtctctctgccaatcctgaatctgaagaaggctgaactcttccagagtgtgcttgtcgaagtctacactcacacatgtcaacagatgacctgagtgagttagggtttagaagccagagatatcttgggcctttcttcttcagacccctaggtggctgttgggagaaggagcagggctagagtcaggtggacttctcaaaaagcttggatacacagaggggaagtaagtatagtgatgagatctgtgtaacactggccaacgcaaggtgggaagaaaggagcaggcatactacccagtcctcccaacaaccgtgagccaagtgtcattatccccattttaaagatgaagaaactgaagctcaggaagttgaagtcacttgcccagggcagttacagctccctgcacatggattgagatgtactggaaggaatgcatctgggtaggcgggtagctgagctcactgacaggcacccaccttcctaacttggccccagccctgtaaggcgcagggtgatttttgtaaacccagctggtgcaatattatctgacttagtctggtgatatcaagtgccaagctgaacaactcaaaaacccctccatctcttaatggaatctccttattctgaaatagcatattctacaatgacagcaaggtggggaaagaggacatgcacatggacagaagcctatctggctggtagcccccatcttgaacatcccaacgtcgagattggtttttacctgcatcagtggagaagggggagccaggtgtgtcctgggggctccaccttgagatcagacagaagccaaacacactctcacaactgaactctcccttcaccggccctcaaccacccccctgactaggccaccttcccctgctccactattcacttctgtttttctccctctccccagttctctccttctttcattcttggagcaagcagcatctgattatttacaaatatatttgagtatttagtatatgcacaagactgagaacatgaactagtggtctgactaccatatctggaccatagagatgttttatttacaacacatagagtgttttaagaaatcttgatgttttttcaacatgaagtattgtaggattttgtgtacaaagtcagatttctgccttctcttgaatgattgaaaagttggaagttctcagatgaacttttcacacagcagcaattggctgaggttgaattatatgtgggtcagaatattttccctgcatcctttttatcccccaaaattaaccttcttcactcatttggctactgggtatgtttaagactaagttgagtttaagactctcatctcaaaaattcccactatgcaggtgagaaaactgagacatcaagaacttggcaacttgcaaggtcactagtgggtggcatcccctgggtcttcctgataactgcccttctgcaatgcctgtgaaagtaaaggcatcttccttaacaggcctgttctctgcctcccatgatcttcacctgccaagcctggaggccaggaggagctagagaagacccaggatgacgcaggcaaaagacaaactcagatgcatggatatctggccttcatcacaaatcaggcctcctcccctgctgatggcttgcaggggtggagctgccgccaggcaggtgagaacagctctaagcatggcactgtccttacatgccctggaagggccaggccttccaggcagtggagcccctaaactggtagcacagactcctctacccaagatttactcacagccctactcctcaagggtgagagtctcccacgctggaggtgcacacacagaaaaaccccacacatacacacacacccatacagaaaaaccccatacagacacacacacacaaacatacaaacacacatacatatacacacgcacacatatatacatgtatgtgtatatacacatacaaacatgcatacacatatatacatgtatgtgtatatacacatatgcacaaaaaatacatatgcatgtacacatataatatacacacacatacaattaacacagatacacacatcgatatgcatacacacatgcatgcatatgtgaacacatatatacctacagacacttatacacacaaacacacacatacatacaacatatacacacaggcatccacataaacataaccacatatgcatatacatatacatgcacacaacatggactcacatacacatatacacacaatgctctgagagagtagcaagtgagcaggaggatggaaatgaaaggaggaaggaaaaaaggaaggaagggagggagaggagtgcgggatggaggaagatctttttaaattactctatggggagtacttgctctgtgccaggcattatgctgtgttttccatgctttatgttattcagtcctcacagcatccttttgaagtgggtatatttttatttttatttttccagtggagaagcagaggcttggagagattggacaactagccccagatctcataggccagatggttagcaacagagctgaggtatgagctgttgtctctgatagtgtgttcatagtcacaaaattcttcttaagtgccagattctaggccctgggaatacagaagtaagaaaatgtttccagtattcatggagttcccaattatgggaagtggggggaaatattatgcaaataatcacacacataatcatgcaattacaaaggtgataaatatgataaaattaaagtacaagacaccatgcatggttataacagagcagcccccacttaaacttaggggtgaaggaaagcctccctgtgggagtcacatttaagcatgtccccagcctattcgccccagctctggtcaaatgccttcccatcagcatactaccaggaaggaagagaaggcagagcccctatactgtcaaatcaggatgactacttcaataatcattttagagacaatctaccttatcctacaaaaagtcttgggaatccaagtgctttatgtacacatacatatatgcatgcatatgtaaacacatatacacctacggacacttatacacacaaacacacacacatacatacaacatatacacacaggcacccacatacacataactgtagtgaaagtctagggtcttgctgtaatgaaagtggcccattctgggacacctcacatctgaagcccccaccactgtgacttctgaagaaatttaggccagcaagaacattactgcttcagtgaacaagagtccactggattgtacgagactggtgttcaacagtgccaccatgtggacaggaccaaaacgatactctagtgaataggtgaagatttctagttctctcacctgacatttggaacagaatgggccccctttttactaaacaagacgccaagtggtccttggaaattttctctttacgctaataatgtaagtggggactcaagtaattggaaaaaataaaggagcagtgaccttagtgtcccttgagctgactaagtagttcctactggcttcaaatgagtctctagaatgttctgtggggctttccaaagacaatctgcatctttgttcaccttccagacctggagctcccacagatagctaacctccctcccaaataagctgctcacaaaattcctcaccagtctaatgaaaagaaaatgagtttgatgtcagataaacctgattttaaaccccagatcctgtacttactgggaggataaccataatcctcccatgtcctgtgctttaattttatcacacctatcacctttgtaatggtatgattatttgtgtgattatttgcatgatatttccccccttcccataattggaggatagtcaggatcctcacgctctacaagaattagatttcctcaaaaaaaaataacatctccttcacaggctgttgtgtaaggtgtattagtatcttagggttgccataacaaatcaccacaaactaagtggtttaaacagcagaaatttattctctaacagttctagagaacaagagtccaaaatcaagatgtcacagggccaatctctgaaagttctaggggagggtcattccatattttccttagtttctgatggttgctatcattccttggatctcccttgcctgtagctacaatgagatgacagtcaggcatgttgtacacagttggttaccttcagttgcatctgaatttacatttactgtgcccagttttgaagccttctgtatcattcaccagtcagtcaacagtaatcttatgaagtcataaatatatttgtcattcttctgcttacagtccactatggttccccggtgaaaaaatggttccccttaagaaaaaatattaatacatctttggaagagcccataagcccttcaccatctggcccagcctggtcttcccctactcctccacttgcctctacttcttctacattaacccactcattaatccatgcacactacacatatatttggactttcaggttttgccctctgccctattctttctatctctaatactccactcctttctccatcgagagtttttcttctcctccaggagtgcttcttctcatcattcaagactcagtttgcatcctattctctctaaggctttcccagatacccctggacagagttagactctcccacctgtgagtttctgaagaactctgtatataatgccaatatggtgctggtcatattctattctgatttccactgtgcctatgttctccaccagactgtgagctctttgaggacaaggacttggttttatccacccttactcctaggttcaccccaatttggaatggagtaggtgcttaataaacacttactgaaatggacatcaaacctgaataagttctgaggactcccaagtccctcagggctggagagaggaaccaccaaattccctctgatatctgggacatacacatagttcacaacaattaaaataactaaatctggatgactcaggacacctgagctttccctcctacattttccaccactttggcaaaccccttaacctctctaagcctcaatagcctcatttgtcactctgaagtaactcatgtgccggccagggctaggtatgtttagaaacgccatctgttttagccctcacaacaatcaaggtacatgagcacttgatttccactttatagatgagaaaaacggaggttcagagagattgagtaactttcccactttacacagctagtaagcagcagagctgggatcagaccaggcccctcaacccagagacattacttattcatttaccgctcctctcagaaaaatctttattgagcacccactgtattgttggcacagctctagatgctaggggtacagcagtgactaaggcaagtgattaaagtgtccccatatttatggcatttacactttccttctgtcatgcacccccccaaagctggtgacacaacatgagaggggcaacaggactgcagtggccccaataaggtccagcatacacagcagctttagaatgagagcagcaagactaaccagccaacgctaacccccaccacaggtggagatggagcctgatgtgaagccacgtcctgcttgctcaggacagggcaggttgaagttctttagcacctgtggttgggctgggccaggacagagaggggagaggcaacctggaagctgcaggtcacaagtctcctctcctgccactttgtgccccctccccagtcctgtcctcagccaagcacaggagcagtcgctcaagtttacgatgtgctgcgtgcaggttgcagacctaccatcatccataataggttgttgtttttactttccatttatagaggtggctgagttaccacctatggtcaccgcagccgttaaactgctccgggggctgagatttacatagcagccatgtgagctgccacaaacttggggttgggaggaggatgttttcaatcgaattagagctgatgattgatagacagggacagcagagaccagcctcatcaactccaaaaagcccaggaagccctcacccagaatgcactccctggagataacagtggtggagcccaggccatgcatgagataaagaaaaaggctcagaacaagtgggtgcacattcgcaccctggaatagctaggaagacctgggagtgggaattagaggatggacctctactcctttcccccatgatatcaaattcgcgtagtaattatgtcttttacctgaacagtggttcctaacaaccagctaataacgggatataatctccatagctttcaatcccaagatctcaaaacatattatgaataattaaatgccattatttagtgatttgggtaatcaaagacctttttaactgtcattttttttcttttgctgtgcccagaacacagctcagcaccatgttctcaaatgaggaaactgaggcacagagaggccaggtgaactggcacagatcatctgatacctcatcgtggctcttagtccccactccacactctttctccagggccttcagcactgtgcctctgcatgactgactgcccccttctccccagccccaaatcccacccccacctttacccatcctagacaccattatttaaatgtttcctgttgaaatcaccctcattcccactggggcaggtgcagggatccagcaggacaaattggccacctcccttcctggcctcaccttggcccctctcttaccatttaaatcctccaccctgaacaaagtagcaaaatgtaccccccttctcatgcggtttagtataaggacaggtttggatccctacaatgaaagttcatgtttctaacaagtgtccacagccagtgccctctgcatccatttaactgttgcctcctgaaagctatcattttctatttcctgtgactaatgtgcactgggagctaaattcacacgtgtgtgcaggaccctacttccaaagacatgtttcatcatcgtccattgacagggctctcaaccccaagccaggacccacgcatgccagaggctgtggcgagccacgagcattgcgtttactcatgcatgggcataaacctccatggcctctctcccctgcacagtctgagacacagggtggatacgcagtaattcaggctcctacagcgggcctcagactcacccctgccaggatacagatattgtagagagatttttttattgtctatctccctcatcagcctgagctctctatctccagatctttcctgtagttccttaatattctgaacaatactatgtggcagatatggtttattccattttacagatgtggaaactgaggttaaatgtttactcaaaattacacagagactaaatgccttaatcataataggactcaagtctctttggtccccaagtttcatgttcttctcacaatcccccagttaatatatctagtccaaataaagaacagattaactgactaatttaaactcccaaactcacttctgcaccagtgctctggaggatcaaggccatatccacagagtacagagcaaaaaaggagaactagcaaatacccagagcatttggcaagtatcttagacattcaagccagaagatttaggagtgaaagagaattcttattatcataattgttatcataattgccaaaacaaataaaattaaccaaggacatgtagctgtatctgcacccaagcaagactgtagcagttcttaaccaatcaacatgtctattagcatgaagcaattgtgtcttgcctgtgatcggcacctcatttttattcatcaaatatttattgggtaccagtgatgtgccaagccctgtgctggaactcgagatgacacagatgactgacgtggtccccgcccttgggaagcatgcagtccaggaaagtcatagaatgcagctcccaagaagaagccactggagcaagcagatgaaggttgggaaatcatgcaagcctagggcagaccagccaaactgcaatgggaatgcagctagctactcactctgaggccctaaagcggaataaaagggactgcaacagcttagatttcccctttccctcctcagggacaggagtagccaccattcaaatctttctgtgatgactagctgtcttagtcagctaaggctgctataacaaatcatcattgactggatgatttaaacaaaaacatttatatctcacagttctggaaactgggaagttcaagatcaaggcactggtagatctggtgtttgataagggcagtctcctggtttgcagatggttgtcctctagttgtgtcttcatatggctagagcactctcaagtcttcttataggcactaatcacacctcccaaaggccccacctcttaatagaatgacactgggggctagacttcaacatatgatatttgggaggacgcaaactttcagcccatagcatgagcagtcttcatgcacaggaggctaatcatgatacttcatgtgcctgccatttgagcctcacatctctcctccatgccagagtgggtcactttatgctaccttattcatccctgatgctctcccttagttgaacagaatccccttcccacccaaggaatacgcattgccctgtcaaacaagggaggctttctcacttagggcaaagtataacagcatcctagctaggatttgggggactcaggcatggatcatttggaggctagatgggctgacagccaactggtaccagacactgtcacttcccattaacagcccaggcatctgggagcttgcccacctcagggcaagtccattgatttattttttaatctacagaaacctgaatctaaaagattggcagtaacatgtgatgcccatattcaggaattttagttttggtgcactgggggcccctgcttgccttttggtcctagaaggcatctcaagggctcatgcaaattaagttccttacagccaccccagagatgccagggtgccccagatgggcacaccagtgacaccatgccatctgatgcttggaccctcccagacaactgctttgctagcgaataattcactggattcagccattgagacactggggaaacatagctgagatgaagttggcagtggagacagttacctagctccttcaagggggaaaagcacatactacccttctttcattaaccagtcagataatgtatctgcagggtgttatcagtcatcagcaccctgttgcaatggcaattaagaggattagaaatcagcttccattttattgcagttcccatggaatgcatgggtagagaccaaagagcagagcaatgcatggctgtcagcaatgcagggtcattagtgaggcttgggaaagacaataaatccccagataagtcaatctttcgacaacaattattgataactagaagttacatcagacgctgtgttgggctttagggaaacaggtgaggccaacactttgcctttccttgaggagttcacatcaagtgcgagacaatgcagtcaagttagcaaattattatagaaaggggcacaaaaaactcagtgagcaaagaactctgaaggcacagaagagaggactgcagattctacctgcgaaatctgaaaggcttcagagaagagttgtcatttgagatggacattgagggtaagtagaagatcattggataaatgaggacagacccttcagagcagcagcacaacgtaatgctcaaagtcatggactatggagtcagacttgtgagattataggttaggccagggactaacctggtgaccaagacaagttactctaatgactctgtaactcagtttccacatgtgaaaaaatgcaattgttctcattattaaattagacaatctatgtcaaagcacagggcacagttcttgggaactggcaagggccaagaaatgtcagctattatcatgatgtgcagaaggaaaggtttgaagtggatgagaaaaccactgtggcttagagctttggtacaaaatgaatagtagtaactgttcaacttaagattttggtatttatcccataatcaatggagaatgccaagcggtttctgacctgaagtatgccacactgagttggggtagagaccatgggcctggatatattgacaccagggaggagccactgacttggggcttgacttcgggtggtataaatgagggcagagagaagggaagggatcctgaagatattagcagggagcttcaactggttttgctgactgtgatggtcggttttatgtgtcaacttggttaggctacagcctccagttttttaatcaaacactaacctaggacttgctgtgaatgtattttgtgactgtgattaaaatccttaatcagttggttttaagtatgggagattatcctacataatttgagtgggtctgattcagttgaaagaccttaagagcagggctgaggctcctctgcagtaaaagaaactctgcctgtggacagcagcttgagccaaaagctccagcctgcccttcctaccagcctattctatggattttggactttcctggccaatcccccacatcgcaaaagccaattctttgcaataaatctgaatacatatctcctactagttctgtgtctctggttgaacccagatttacacaataacggattggataaaggaaatgcgatctgtccataaaatggaatattatccagacttttaacaaagaaggaaagcctaccatttgtgataatatggataaacctggaaggcataatgttaagtgagccagtcacaggacagatactgcgtgatttcacctatatgaagtagctaaaatagtcaaactcatagaagcagagaatagaatggtgggtgccaggggctggggggaagagagtaataagggagattttgcttaatgggcataaagtttcagttatactaaatgatacactttagagatctgctgtacaacactgtgtctatagttaacagtatgatattgtgcagctaaaaatttgtataaagggcgtatctcattttaagtgctcttatcacaaaaaaaggaggtacaaaaggaaatttttgaaggtaatagataggtttgttactttgaccatggtgatattatcatgggtgtatgcatatgtccaaactattaaattgtatacattaaatctgtgtatttttaatatcaattatacttcaataaagctgtttaaaaaaatgtagagctaaaagaagccacatcagttcctagagattcctcacaaagccttggacatacgattggttcctgcctcatccttgtgccaaagtctataaaaatctctcttttatgtggctgccttttctggacaaggcaacattcctgtctcagttggcagctctatagagcagattgcagaagtttggacatattgactctgacatatggatcatgctctcaggttggtttttgttttgttttgttcctaatatatatcgttttataaggtttcttttatgttaggctgagtctttgatctccccagaaaaaaactctgcctccccccagagtttcttttaatctacaaaaatcactgaccacagctgcagacagggaagggttctgcaaagagacaagccaagtacagtgagagaacatagactcagagagaggtaactaggaagcacagtgcgtttctccaaggcccctgacattcgtgtgacgtgctctttgcagtcatccaagccctgagttccagaatgcatggctaacaaatgggaaggggagagccagctctgtgccagtcttgtctcaaatattagctattctcattcttgcatcagtctggtgaggtaaagaccctgatctcttataacaattgaggaaactgaggctcagggagtgtcttagcttggctcccccagaagcagatggtgaggcaaaggttccttctactttgatgtaatttcaaatttaaagaaaagttgcaataacagcataaagagttccaaaatactctttatccagattggctaattgttacattttctcctatttgctttgttattctccttcttctccccgcctcccatggttttttaatgaattatttgaaagtaatttagagacctgatacacctttgcccctaaatatttcagtgtttatgtcctaggaataaggacgttgttgttgttgttgttttgagacagggtctggctctgttgcccaggctggagtgcagtggcacgatcttggctcactgtagcctccagcacccagactaaagtgatcctcccacctcaacctcccaagtagctggggctataggcatgagccaccacgcccagctaattttttaatattttttgtagagacaaagtttccacaaaaatattgcccaggctggtctcaaaactcctgagctcaaatggtccacccaccttggcctcccaaagtgctgggattacaggcatgagccaccatgcctagtcaggacattctttttttttttttttaacttttattttagtttcaggtacatgtgcaggtttgttatataggtaaactcttgtcacgggggtttgatgtacggattattttgtcacccaataactattgggtgatgaaaaagttaactgttaggtactagttaactatcatgtactaagcctaatacccaatagttcttttttctgctcctctctctcctcataccctccctctctgttagaccccactgtctgttgttcccctcttcgtgtccatgtactctcatcacttagctcccacttataagtaagaacatttgatatttggctttctgttcctgcatcactttcaatgccaccatggtacaattatgtaccatgaatcatgaaatgtaacactgtcacaatactactatctgcacaggccacactcagatttcatcaattgtcccagtaatgtcttttataaactatttatttttccttgttcaagatccagtccagaaccagggattacatttaattatcatgtctctttagcctcctttaagctaaaatatttcctcagcctttctttgcctttcttgaccttaacatttttgaagagtattggctgggaattgtgtagaatgtccatcaattttggtttcactgagacaaagattttttgaaagcactcctcaggaagtagaaccacagaaggaaaatggtcagcaaagttgtactatcaagcaaagtcccacagcaggcgagtctggctcggtcccacagggaagctctgcaaacagtatgggtcacacctcagagctgtccaatttagggacaatggagctggagaatgtttgacccctgcacccagcaattgccttcagctccagctctcatgcacagtgcctaaggggctcctgcagccagaaggcacacatgctggcccattggctggtgagtacaaactgtgaagggatctgggggaataaagctggggcactggcagtatgtgctacaaagagttttacttacccagaatcacacagtttgcaagtgacagagatggaattccagcaagctccgtgtcatttatctatattccatcgcctccctgaagaactaatatcaaccagaagcctggataatcctatgtcccagagaaacaatgcgtcaggcatcattttgccatagaaatgtgatttttttttttaagtttttaagcagaatcccattgtctgcattttggagtgtggttggtttttattttcttgactttttccattattataaaatgtcatgcaatgagtttatatgtgtgtcataattaataagagaaatgaccaaaatgcagaacactcggttccccaggatacatgactgcggctggacagcacagcatctgagagcctgggctctggctccagtctccctggactcctgtgcagtcgccaacatgtcacctgcctctcagaatatccacttagcatctgtaaagggtagtaacaccaccaactaggaggttagcggagagttaaatgagatgaggtgtgtataactccgttaacgcagtacctagtgcatggtgcgtgcaatggtcggaatgtttatgtccccccaaaattcatatgttaaaatcctaaggcttaaatggtgctattaggaggtgaggcctttggggaataattagcttatgagggagtatccctcatgtatgagaatagtgcccttataaatgaagcctgagggagcttgatcgccccttccaccatatgaggtcacagtgagaaggcaccatctgtgagcaaggaagcaggccctcaccagacaatgaatctgctagcatcttgatcttgaaattcccaacccttagaactgtgagaaacaagtttctgttgttggtgacccacccaatctatggtattttgttatagccacccaaatatgctaagacagtgtgccctctgtaaatgttaactgtgttattaatacccttgatttaggccgggtgcagtggctcgtgcctgtaatcccagcactttgagaggctgaggcaggcagatcacttgagtccatgagttcaagaccagcctggtcagcatggcaaaaccccatctctactaaaaatacaaaaattaactggatgtggtggtgcacacctgtagtcccagctactcaggaggctgaagcaggagaattgcttgaacccagaggcagaggttgcagtgagccaagattgctccactgcactccagcctgggtgacagagtgagactctgtctcaaaaaaaaaaaaaaaaaaaaatacccttgatttacccagagggtgtggtgggtctgccctgcctgcatctgattcacctttgtccctacccaccttttaatctcctctgctcagcacaggccagcctggcagtcagtggttgaagtatttgatgaggaggttgataagaacaaagaatatccatctgtgggctggtggagacaatactggggtgagagaaagtagccatgaggatagaacccataagacaaagtcctaagagcttaggggtgaaactgcaggctggctccacctgagacaccacttcctgctcagtctttattcttttgaagaagagtccgcccagtcactgaaggccatgagaaaacacaaaaacatgtgcagatcctccttccacatgtcactcccctcctcaaaacctctcagcagttcccccattgtccttgggctaaagaaaaaatcctatcaagggtcttcaaggctcttcatggactagtcctcacctcctttccagtgccatctgctgtcacctccacctacaatcaccacccaacacattgccctctgaaatgttccgcctgagtcacttgtcttttcccaaatacaccttacaggttcactccttcatgcctttacacaatgttgcttcttttttctgtaagaagcatccctgtggagggcagattctaaggtagctcccagtgatcctaccttctgatattcttgccattgcttaattcccccctttgagtctggaatggacctaataactctcctctaagttactggaagagaaaaacgatgggatgtcacctctgaaattaggtaacaaagactcttgtttgtcttattcatcctttcttggttgcttgttctgatggaagccagctcccatgttgttaagggccccacatagcaaggaactgagagaagcctttggctagcaaccagtgagtagctggggccctcagtccagcagcccatgagaaattgaattctgccctcagatgaaacctcaggacctcattagccctcagatgaaacctcaggaccagtcaacatcctgattgcagccttaggggagaccctgagcctgaggacttaatttatccatgccctgatttttgacccacaaaactgttagataatgaatgttttggttttaaaattctacgtttgagagaaatttgatgcacagcaatagagaactaatacatatacctttcaacctgtcaaagtcatactcacttactccagtattacttgtcctaggaagtcttctctggcttcctgcccttcaccttggctgagttggtcagccctcctgagtggtgccatcatgccctgtatttccccatcacagctccagacatggtaccacaatttcataataacttgtcagcctctccctctggaatgtgagtcctttggaaccagggcttgtggcttattcacctccataaccccaaacaagcccagtacctgacacctaataataataccaaacatttattgagcgctcactgtatgcccagctaaattttcttttcaaactttatctcactgaagcctccaattaagcatcattaaacccactttactgatgacaaaattgaggctcagaaagattacacaagctaatatgtggcagaagtggaactttaacccaggcagcatggctccaaagttctagctctgtgtagtaagcacttgttgaatggctacccaactgaggatgtgctatgtggccacaggattgaccacagacccgatatgactgggcatctatgtatctgccccacagaggagtgagagccccacaaagtttcagagataagttaggagccagtgagcttctaacttaggagctatttccattcttgactttggaacagctgggttgggatttcccggaaagcctgagccagaggccaagactgaagccagggagcaaagttaagtggccaagtcaggggccaattagccatggtgagctccccagggattagagtccctgagccaggtgaggacaaagccagggcttgagggtagaagacaaccatctgggagacccaggtctctgaaagctcataaatatgtattcatccatccaaccaattccactgttaagacgcaagtcctgatgtttattgagcatgtactatatgtcgggtactgtctagggctgggatagaacagtaaacatgtcagacaaaaatttttttgtccttgtgactttacattgtcatggggatagagagacaggaagacaattaaaatgaataaggatattataagatagaaggtttttaagtactatgcagaaataaatcaaaaaaggaggagaagggggagccagggtgtaagaagtgtggatgcatttagtagaattatctcatgtggaaaatgttaagaacttagcctgacgtgtagtatccatgtaacaaatgttaatgttatgactcctactctgagaacaagggtggggaggtgttgtaatttgtcctaaagctagctcagtgagttttaagggggatacctctgtctttagtgtcaggattcattgagtcaagctcatgaacattaacatgtgttggttccagtggaagacagatttctaagcaatgtgggagactctgctgggatatggacaaccataaaacccaaggtcttctctgtgagtacaaggatgagggagcaggtgaatataaagtttacagtaccacctgaataaatcagctggacacaaaccagcagctaggactacatatgatggcacacccagaccttgggctctaatccatcaggcagttcaagggaccagaggcagaagctgagatggaaagatgggcgaacaggctatgttgaggaaggtcaagatcttcccatggcctcactcagtgctcatccatggttcagggcctgccctgagcagtacaagtaactctagccccgatgcaggctcatctgagaccttgacagctgctggtctgatccaaacagatatctggggaagtagggctcagcttgcagctgatgttgccagtccaactcctgaattctccaaatcacactctgcaacatgcatcacctagcactcttaggctgagattttgtatcatgaccacatttagagcctaacctcacccttccccggcctagatctattcaaacatcctagccaacctctctgaactcctaggtatgagcccagaggcacccaaggcatgccaggtttgtcttagaagtacttgatggcttttttcactcctgccccttcctgccctcagcagtctcctggggtgacttctaataaacacctattaggtgccagacaccatgatcatgtagtcctcagagcaccgctacaaaggatctacattatccatttcatgagatgagacaactggagctgcaagacagtatgtatactaaggaaggaagcatgcacacaggatttcgacccaggtccgtgtgattccagcccatgcttcttccataaaaccatgcagcctccagcccacatttttcatccataaaatgggttcaaaatgagaacacatggacacaggaagggaaacatcacactccggggactgttgtggggtggggggaggggggagggatagcatttggagatatacctaatgctaaatgacgagttaatgggtgcagcacaccaacatggcacatgtatacatgtgtaacaaacctgcacattgtgcacatgtaccctaaaacttaaagtacaataataataaaataaattaaaataaaataaaaaatgggttcaatagagcctacctcatacagctactgtgaaatttccataagaaactacaaaaccttcagcacaggacctaataagggcctgagagaaatgacatcatctttcagccttcctgagacatcctgctcattgctttgagaaaataacagggtaggaaggaaatgggtatccttggaaatacttagctctttcttctcaagagaggaagctactccccagctcctgggcactcataactctaaccaggaaagtgctcatttggtgagaatcagggccacacacaagccaggagcatctgctcaagtattaaaagtgagcctgtacggtcctgctattaaactccctgtgggtgagctgggttaacggtggggcctcatgtgataagtcattaatctctacatgtaatgcaagagctgtacaacttacttcagccttaatctcccatgagttacagcttcttctgtgattcataaaacaaatcaatcacacctcccaggctctcatctatttattactgctttttaagtgcttggagagggagaaactggtggatgtttttaatcccctccacatctaggcagacctccacaggctgcaggaaaatggactctatgccccaactcaggtcacagactaagattagtcgaactctgaagcttgcaaggagcagacaactttgcatctatagcagctggaagatacctccctattgctcagaaaaggaactgggatcaggtttggtcatcgccagcctgcatcaggaaggcttgttagtgtggtgggtttaaacacaaccacacacttcttgacacttctctctttgagagttaggatctctgtctgccctccttggaatctgagtggtcttgtgactgcttcagtaggatgtggcagacatgatgctatgtgacttccaaggtttgtcataaaagaccacaaagtttccatcttattctctgggacactgtgctgccacataaggagtcacaccagaatagaaacatgtagtcccagctgagtccagcttccagccattcctgccaagatgccagatgcatggaatcagattctccaatctcctaccattcaagtcacctccaaattttttagttttcccaactgaggcctcagacaagctttaatgcagagtcgagcaatccttactgtaccctctctaaattcccaacctacagaaactgtgggcatatttaaatggttgttttctgtatcattaattttgaggtagtttgttacacagcgataggaactgtaaccatcagcaaggaagcacagcagtagtagcatagtagtaacaaaagggaaagtactcactgcatgcctactctctgtcagtcactttgcatattttagtattgcaatcagtctttaccaaattcctacaaagtgggtgctattgtccgtactttacagaagagggaatgatggttctgaaagaataggttacctacctcaggccacacagcaaagatggtatccacagccctggctatagatccaaactgctacttgttcctctggccacactgactaccaaacagctttgcctgaattctctacatatttcaactattttgcctaaacttttccaaagtcattcaggtatttggctttaattacctcaatatttcaactatttttcctgacttcgttggtgtcttagtaatttttacctaaatctctgctgagattattccactggtggtgggtgtggtgaggttgtgggggtcttagcttcttgaccacaccaggagctggacaggagtggacactccacagcaagccccaaaacttgaggcctcaggcatgggcctggcagtgggaaggatctagattgtaagtcctcctgggccactcatgtccatgggacactgtccacagaagcagtatgaggccaggagagtgcaagcttgactgcctgaactccctcttggcctcgtgagccttgcagagtgcagctcctgccttcttcttgcaaacaatgtcagccttccagacacaagctatggcctggtgagtttcatctcctagtcttcccacaaggaagctgcttaaacacaattctgcaagatcatggtcccgcttcatagccgtatggcatacaaccccttcaagtagtagccctgggaggtgacctcaggtggacagcatgtggctactcaaaattcattcgaagtagaagtggagacagcaaggcatgagtgtggaaagacaagacaaagatggtgctaactccaaccattaagtgatactgtaggcctccctcagctaagaacttaaactcccactccaggttcccaccatccatctaccctccagccaggaggatcttttaagataaatgaatcagatcacagttcgctcttcatttaaaaccttctaacagtgttctgccacacaatggccaaaaatccaaactctataccatagtctagcagagatgctcaaacttagcatgcatcagaatgacctgtggggtttactaaaacacagattgctgggcctcacctcctgagtatccgatttagcagatcatgggtggggctcaagcatgtgtattctaacaagctcccagtggatgctgatgcccctgagaaccactggcccatagaacccagcatattttgactcctgttggcctcttcagcctcactctttcctaacctaactctcattcacatataccaagccacaaagaccctcactgggatccataaactcacctgactgtttcttgctttcaggaccttagtgctcaggagggccctctatgtgtcccactagtccccagtcctgaaaaccttctcattctccagggttctggctgatgccatctcctaaaacagcccttccctctcctcacccacgaaggataacctcaccctggtacctttattcactgcttcccttctgtttgcttcttagcaagcctcaatgtgcaatgggaattataactctttatttattggggtatctctttgtatatttgtgagagctttctcctgccactttagactataggttccttccaaccagattctgtcttaatcaccacggtaatcccagcaccccactccatgactgtcaaatggtgggtgctcagaaaatgtatgttaaattggtacattgccttaattcattctcgttacaaccctgggagaaaggaattgttaagcccattttacagatgaggaaacagtttcaaagagggaagtcccatgctcaaggtcaaacagtcaggcattgaacctaggtctgtggactccaaaggtcttaacccactctgtgtccattgggggacaaacaaaggagcagggctattgaggaaaaatggtatggatgagatactggagaacagaaatgaggcaagcaagcagcaaggaggcaggcagaaaggtcagctggcataaggacttgggcaccctccagacaccccagtgccctgaggggacaaagaaacaaatgagggtgttcacccagctccacatggagtccaggcagctgctgcctgaagcactgtggggttgccgcaattccacctttaggtgtgaaggcttttgcttttccacccccatcccctccatcagactttcctcttctggtgtctcattggtctggacagtaggtggagcagaccatggacattgggaaggggcagggttcagggcaaaggcagggcataaatgggggaaaggagaagagctgaaccagactgggaacagggacacaagaggacaccactgccagctacatctgcttccaagagctgagattccacagccaaaggtcttaaactccatgatatgaatttcccttcctgttgtgcaatgaccaccctggcattgcaccagagggctgcggtccaggggtcaggcccctttaggactgtaccctggcctcatgctcatggccatgtgttctctgggcagcagtgctgagcctggaaggagggaacctcctactggagacacctgtagggcactaaggagaaagggagagaaggaggtatggcctcagcttctgcctccacagcccaagcgtcagcccgcaaagaagcaggaatggggtacaaggctgtgagcttcagggcaaagaaggcctcccacagggtgctgctcagagacagaggtggacatctgcagaagatatgcacaaataatcgcccagcacctcagaaggtagatactcccaggaggcaatgcgcctctccccaaaagtggcatagaaacctctttctccttctatatcccaactcaaaagctcactaacaagggctaagggcctctagcttaaaggcaaagaggacatttgaaaagactttgctcctcgtgtgtgtgtgtgtgtgtgtgtgtgtgtgtgtgtgtgtgtacatgtcaaggtgtacctgtgtgtttgtgcatattcaaaaaaatgggaggaggaagaagtagagggtggatgacagaaaaaaagtgtgtaacccagttaatgtaggtctagaatccaacagtggtcagtaaggggaaaagaccagtccaaatcattaatcaatccaccaatagttatttaactttattacacgccaagcactactttgaacacttgggacacaagagaaaatggcacaaacattaagccctgatttcatgaagcttatgatgtagtgagaaatacagccaatacatttatatactgttgagtataataagacagataaaaataagggatggagcactgtgggaataaacaccagaggactctaggaagggaggcctcccagaggaagcaatatttaagagaacaactgaagggtgcgtagaaattagctaggtaaagtggcaggaatgcaggacagaagggccaaagtctttctgatgtagagcaaagagcaagacagaacatgagacagactgagatagagccaagacaaattagaaagaatctcaaagaaataaaagtagtaataattactttaaagcacacactcaaactagtttaacaaaatgttgttttaattatatctaccttaatgaacagataaaaacagtttgtaattagttctgtaattggttatgtgaaaagagatgcatcttcaagttctaaagcatatgtcccgtagacaatttatgagaaaaaaaagatgcttcttcaagtactaaagtatgttgccctaaagagctgtcacattccagtgtcttgtagacatatttttttcatgggttctgcaaaagtagactgtatcttagtcatgcctggatcagaaacaaaaagaattaaaaagagcttttactctagatgtaagtgactctacatagagctgaacagactgacagatctgggttcaaatcccacttctgtcactcacaagttctgtgaccttgggcaatttcctgaacctctctaaggctcgatctttaaaatggggatgaagataatgctattgcataaagttgttatgaaaactaagcaaggccacacacacaaagcacacagcagagtgcacagcatctatttgcatttaataaacatcaactgttatgtggacccatgcatgttatgttaattggctactgttggcatgacaaactactatgaatttaggagcttaaacaatgcatattgattggaggaaccaagatggcccattagaaacagctccggtctgtggctgtcactgagaagaatgaaaatggtgagtgaatcccgctccatcaactgaggtatccaggttctctcactgggaatgattaggatgttggcatgacccacacagagcaaggaaaagctagtgtttcctgactgctggctgtctggatgagggggattcttcccagtgcagccaaacctgctcagccaaggggcagccagactgcttatttgagcaggtctctgattccatgcctcctgactgggtgagacttcccaacaggggttgccagacacctcatacaggagctttcttgcctgcatcagctcagtgcccctctgggacagagctcccagaggaaggagcaggcagccatctttgctgttctgcagcctccactagtgatacctccaggtgcaagagggacccaggagaattgggtctggaatggttcccctgtaaactgcagcagccctacagaagagggggttgtttgttagaaaaacaatcaaacaaagcaacaacaaggacaacatcaacaaaaaagaccccacaaaaaccccatccaaacataaccagtctcaaagattgaaggtagataaacccacaaagatgagaaagaatcagtgcaaaaggctgagaactcaaaaagctagagcacttttttttcttcaaatgattgcaacatctctccagcaagggcacagaactgggctgaggctgagatggatgaattgacagaagtcggcttcagaaggtgggtaatagtgaactttgttgagctaaaggagtatgttttaacccaaggcaaagaagctaagaaccatgataaaacattacaggagctgttaaccaaaataaccagtttagagaggaacataaatgacctgatggagctggaaaacacaacctgagaacttcacaaggcaatcacaagtatcaatagccaaatagaccaaggggaggaaaggatctcagagcctgaagactatcttgctgaaataagacaggcagacaaggttagagaaaaaagaatgaaaaggaacaaacaaaaccttcaagaactgtggtatcatgtaaaaagactgaagctacaactgattggggtacctaaaagagactgggagaacagaaccgagtcagaaaacatacttcattatatcatccaggagaacttccccaacctaacaagacaggccaacattcaaaatcaggaaatccagagaactccagtaagatgctccatgagaagatcaaccccaagatacataatcagattctccaaggtcaaaatgaaggaaaaaatgttaaaggcagccagagaaaagggtcaggtcacctacaaagggaagcccatcagactaacagcagacctctcagtggaaaccctacaagccagaagagattgggggccaatattcaacattcttaaaagaatttccaacccagaatttcatatccggccaaactaagcttcataagtgaggaagaaataaaatccttttcagacaagcaaatactgacagaatttgtcaccaccaggcctgccttgcaagaccttctgaaggaaacactaaatactagccactatcaaaacccactgaagtacacagaccaatgacactatgaagcaactacattaacaagtctgcaaaataaccagccaggatcatgatgacatggtcaaattcacacataacaatattaaccttaaacataaatgggttaaatgcccccaattaaaacacgtagaatggccaactggataaaatgacaagacccaccagtgtgctgtatttaagagacacttctcatgtgcaaagacacacataggcttaaaataatgggatgaaggaaaatttgccaagcaaatggaaagcagaaaaaagcaggggttgccgtcctgttttctgacaaaacagactttaaatcaacaaagaccaaaaaagacaaagaagggcattacataatggtaaaggattcaatttaacaagcatagctaactatcctaaatatatatgcacccaatacaggagcacccagtttcataaaacaagttcttagagacctacaaagagacttagactcccatacaatactagtgggagactttaacaccccactaccaatattagatagattattgagacagaaaattaacaaagatcttcaggacttgaactcagctctggatctagtggacctgatatatatctacagaactcttcacccaaaaataatagactatacattcttctcagtgccacatggcactaaattgatcacataattggaggtaaaatactcctcagcaaatgcagaagaactgaaatctaacaaacagtctcgtagaccacagcacaatcaaattagaactcaagattaagaaactcactcaaaaccacacaactacatggaaattgaacaatctgcttctgaatgactcctgggtaaataatgaaattaaggcagaaatcaataagttttttgaaaccaaatgagaacaaacaacataccagaatctctgggatgcagctaaaacagtgttaagagggaaatttatagcactaagtgccaacatcaaaaagctagaaagatctcaaatcagcatcctaacatcacaattaaaagaactggagcaaacaaaccccaaagctagcagaagacaagtaataaccaagatcagactagaactgaaggagatagagatacaaaaaaaaacccttccaaaaaatcaatgaatccaggagctggctttttgaaaaaattaataaaatacaagaccattagctagactaataaacaagaaaagacagaagaatcaaacagacagaatgaaaaataataaaggggataccaccactgaacccacagaaatacaaacaaccattagagaatactataaacacctctatgcaaataagctagaaaatctagaagatatggataaattcctggacacacacaccctccaaagactgaactaggaagaagctgaatccttgaatgaccaataacaagttctgaaattgaggcagtaacgaatagcctaccaaccaaaaaaagccaagaaccagatggatttacagctgaattcttccagaggtacaaagaggagctggtaccatttcttctgaaagttttccaaacaattgaaaaggagggacttctccctaactcattttatgaggccagcattatcctgatatcaaaacctggcagagatataacaaaaaaagaaaacttcaggccaatatccctgatgattatcagtgcaaaaatcctcaataaaatactggcaaacctcattcagaagcacatcaaaaagcttatttaccacaatcaactcagcttcatccttgggatgcaaggctggttcaacatacacaaatcaataaacagaactaaagacaaaaaattatttttttattcagccaacgaacatatgaaaaaaggctcaacatcaccatcatcagagaaatgcaaatcaaaaccacaatgagataccgtctcataccaatcagaatggtgattattaaaaagtcaagaaacaacagatgctggtgaggctgcagaaagataggaacgcttttacattgttggtgagaatgtaaattagttcaaccattgtggaagagagtgtggtgatttttcaaagacctaaaaccagaaatgccatttgatccggcaatcccattactggatatatacccgaaggaatatatatcattctattataaagatatatgcacatgtgtatttattgcagcacttttcacaatagaaaagacatggaatcaaccccaatgcccatcaatgatatactggataaagaaaaatgtggaacatgtacactatggaatactatacaggaatgagatcatgtcctctgcagggacatggatggagctggaagccattatcctctgcaaactaatgcaggaacataaaaccaaacactgcatgttctcacttgtaagtgggagctgaacaatgagaacacatggacacagggaggggagcaacacacactggggcctgccagggcaagggggagcataggaagggagagcatcaggaaaaatacctaatgcattctgggcttaatacttaggtgatgggttgacaggtgcagcaaaccaccatggcacatgttttcctatgtaacaaacctgcatatcctgcacatgtaccctggaacttaaaattaaattaaattaaatttcaaaaaaaaagaatcttctaatttcaaagctttatcaggtttaaaattaaaatttatatttatatgtttgccaaaaaaacagtgcatatttattacttatagttatctgggttagaagtccaaaacaggtctcaaggggctcctcaaggtgtcagcagggctgccttccattttagaggctctaggggagatccattttcttgtcttttccagcttccagaggccaccacatcccttgcctcctgaccccttcctccatcttcaaagccggcaaggttgcatctctgacccttcttccctattcacatatacctctgaccacagttggaagggttctccaatttcaaggacttatgtgaataaattgggcccacctggataatccaggataatcaccccatctcaaggtccataatcttaaatcactctgcaaagtacttttgcaatgtcaagtaacaggttcacaggattaaggcatggacgtttttaaggggccatttttctgcctaccacaaatgtatatctttaactgcatgtcattacaatgattttttcataaaagataaatgaggtccttataactacagagtcttctattcttccactcttcctctgccctctcccactttcttatatgttactgaaagtgagtttcttacatcaagtgtaaatccattgcacagttaattctaaggcctttagtgtccctaattcctcttctttcggaggttactttgctgtatcatcattaaaccacgttaaaatatgttcatatcttatactacatgaaacttctatataactagagttgaagtgaatttgttgacaaactgttgtgtcttatgtacatttaattaaaattaattttttatactttgcagttttctttacttttttatatcccagctattttcatagatctcagaacagttcataggtccatagacactgccttaaagactcagtgaacaagaagaccctagatcaatagatattcttccaggagaaggggggaaggagaaagaaaaaaagaaaataaaagaaaaaagaaagaaagaaaagggaagaaaagaaaagaaaagggaagggaaggaggaaggaaagaaggaaggaaagaaggaaggaaggaaggaaggaaggaaggaaggaaggaaggaaggaagggagggagggaggggaaggagaaagggaggtgaaggagaaagggaaggaaggaggaagaaaagaaagaagagagaaagaaataatggagggaagaaggaaggaaggaaggaaggaaaaaagggatggaggaggagaggagaaaacttgattacttagtgctctctagtgtgaaaactcaatgacccactctctcttccagtgccaggaccatcgttcagaccatccatgagtaattcagtcatttgtttattcatttatacaacaaataattcctttgcacctgtaaagggcccattcctactgggcactgggaacaccatgatgaataaggccctgtccccatcctcaaggatctaccagtctttacctaatcttgtatgtgagtggacacacatcacctttacttgaaagaacggggctggcccactgtcagggaacctacctaccatcaccaagaatggctagatgagtaccaggtctttacgtgcatagataacaattcagttccttagctggcttctttcctattttgttataacttacatatagtgatgtgcacagattttaatcacaccggtctttcagtttgactgaaacccatagaacgtccccaacacccagaaacgttctcttctgcccttttccagcaattcctcctccctggaagcaacgactgccctgatttctcaccacgagttagctttgcctgttctggaacttcacatttgtggagtcacacagataaacacttgtgtctggctttttgtgctcagcaggatatttttgagattcattcatgttgttgtgaacagatcaataatctgtttattttaactgctgagttgtatctcactgtataaatagaccataaatgtttacccattatcctgttaatgaatattttgaaccatttccaattttaggttattgtgattaaagctgctatgaatatttttgtaaataattttttgtggatatatgttttcatttctctcagataaatatcaagaaatagaattactaggtcataggctagatgcacatttaactctttaagaaactgtcaagtcattttttaaagtggatgaaccattcacaatccacccatgatgttctggcggctccacatgctcaccagcatctggacttgtctttcccatcttttttgctctacacactctggaaactcaactcagaactctgtatttacttatttttttatatttttagagacagagtctccctctgttgcccaggcaggagtgcaatcacacaatcatagctcactgcatcctcaaactcctgggctccagggatcctcccacctcagcctccccagtagctgggattagaggtgtgtgccactacactcagctagttatcttattttttgtagatatgaggtctcgctctgttgcccagactggcctagaactcctggcttcaagtgatccttccactttggctctccaaagtgctgggattacagccatcacccactgtgtccagctagagctctgtatctttttaactggaaatgtttaatctagggtgtaaagaatgcttcagggaacctcaggtccctcctagaattgtagtttaaagtgtatgcatatttgtgagtgtccatttttctgagagaaggaaatgcagttttcaaaaactaatgaagtacagctctaagaaatacatttacatttgaaaaaacaattcttaagaatcaatggagcttttcttaccttctaagatggaactaaacccagaaagcaatccacaaactgctcctccagggacaaaggagtggtgggaaggatggtcaaggtttcctagcaagagcctctttagggcctattggaggcttgctccattaagattaaatcttgcaaagactgtaggctgacaataccttttgtctaagagtaagaaagagccctccccagccacacttgcgggcattcctcctactgatctggctgtaccacaaaggtgaactatgataaaaccaccttttcccccttacaacctacagcccccaaacagtatccccagacagcttcaatatcacaccagcacaactgatgactttgaaatctgcagatctaccttcatctgcgtagactccaaatatctcctcaaaatggacctgcttagaccttggaagccctgtctggataaagatcccttttccctgctgcaaaagtgcctagctctgctctgtccaatacagagccacatgtggccaagccgcacttgaaatgtgactggtccaaattgagatgtgctgaccccgtgaaatacataccagatgttaaacttagaatgaagagagaaacattttaaaagatctcattaaaaatttttctattgattggatgttgaagtgatcatatttgggataagtgggttagatagactattattaaaagtaattttacctgcttctttttaaactgtaactactagaaaatttaaaatggcatatgtgtcttgcattatatatctattctatcccctgatgtagcttattctgctctgcacggacatacgtcccaaaactcaggccagctctatgtggccatcatcacaacctggtagattagatgccctgggtccgtctcccaccccaccatctgcaagaacttcagcagaacttcttgtggtctttataccgggtgtcaaacagttaacactagcccctggtggtctgcccaggttcacaggtcaagcaagctgctgcctgtccctaagcccaaccatgagcctcaaaagaagcccatggccatgcactgatatgatgaagaagtggccagccagcaactagtgacacagcatctggtactgaagccaatcaatgaagtgcaaagaacccaggaagggggaccaaccagcctcctttgcctgagactggggagtttctgggaagtggaatttataggttttttgggttttttttagatgaagtttcactcttgtcgcccaggctggagttcaatgacacaatctcagctcaccgcaacctccgcctcccaggttcaagcgattctcccgcctcagcctcctgagtagctgtgattacgggcatgtgccaccaagcccggctaattttgtatttttagtagagatggggtttctccatgttggtcaggccggtctcaaattccccgacctcaggtgatctgcctgccttaaagtgctgggattacaggcatgagccactgcgcccttccaatttttagtttttaaaacaaggcaggcctaggcaagcgaaaataagctgttcaccctagacccaggtatgcacgtgagacctgattctcaggggtcctagggcagaccaaccctcccacccaccaacagagccttgagatatttgtgggatgtgcagggcaaatataaaaattccaaccgctgcaggcctcacctgggccactgccttccctgaaacaggtgaaaactgaaattctcaagccacacccactagagcagcaggaggaagaatgggggaaaccctttagcagtgatttggaatcccactgtgtccctcctccatgagctgtctgtgtgtgactgagcagctcgcttccctcactctctgggggtggggtcagggtggggagtctgtctgactcactgcccaagccacaggcctgtctgcttgtccccagacaggggacctacctacccactgtccttcagctctgttgtcagccacaggctgtgcccaagagggcacatggggttggtgtggggaggagggtaggtttccttggctgaggcagaggaagttgctttctgtctcaagttctgctcacaggtcagacattaccggccttgtgatcatcaatctcccattgtgtcctttcaacacgtaccagtgtcttcaacactaagtcccttgcagagggaatgggatagggaccgaacctcacatgcttttctgcttccctgtggatttgtgaggctgatatccaggtgaagagatcaagtagagttttgttcattcactcaaatgttcactgtgcctagtaacaggcagacactgagaaaattgctagaaatacaacaatgaacaaagttcctgcactcatgatgcttactgtctactgggggaaaccaacgataaaagagtcagtacaaaaaaaattaataagtgttaggggaggagaagagctgggtactgtgagaacacatatccaaggatctatcgtattctgggcaatcatggagtacttccatgaggaagcatggtttatgttgagacccaaaatgaggaagagttaacatatacttaactgtgtgccctagaccttcaaggatggggactgcctctctgagcagctgcagggaggcctctggagaggtctctacactgtgatgctgggttagccttacctatgagctgatacacgcaggcctcagagcagggcctaggttgtccccattcagggcggattctaggacctctctggaaggaagagaccccaggcgtgggagagtaggacctagtctcaggaaggaacacaggccctagattaagactgtgggctctcgaatccaacaatctgcatttgaatttcagggccatctctgagtctgtttcctcatctgttaaatgggagcaaaacagcacgtatttcataaagctgtggtgagaattttaaaaggcaatccatggagagagctgagggtggtgtctggcacacagcaaataccaaataaaaagtgagatttcctgctttcaattattagtgttacagtgaagaaagatacaaagtgctgtgggaaccgactacctcctatcatttatcttataggaacaatcatttaaaagaaactccaaaactggcaaaatgccacattgtgtctcaaggaagaaatattggatctgagcctggaagggtggctatgtgacttgcagagaaaaagtatgaagaaaggcacgaagaccagaatgggtggggcgcctgcaggagcagtgccggagtgctggaggggagaggagatggcagagcgccaggctaaagggctgggcaaggcggggcaggaggagccggaaggccctgctaacaacctttgccttcatcctaaaggcagcggccaggctactgaagatttgagagttggttggtgatctgttggggtttgcataggcagaatggagatttcctggaaaaaaacaggaagccagggaccaaggagggggctgatgtgagtatctaaggccacctcagacatttatcagaacacccagggctgtttcttggttctgtgccttgacaacacactatgtcctctgcttggaatttcaacaaacttaccttccaaaaattaatcaagtaattcatttattcaactagtattaattaagcacttatcctgtgtgaagctcagaatctctactctcaggaaattgatggtctggtgcaggggccagcaaactttttctataaagaaccatagagtaaatattttaggctttgtggaacatagggtctctgttacaactctaccattgcagagcaaaatcacccatagactatggaaatgaatgagcctggctgcatttcaataaaactttatttacaaaaacaggcagtgggccagatttggcccaagggctggtcaattcctgttaaaatataatataagccataaacatgaaccattatctatttaaattacatatgcaattaaaaatgttctagtagccacatttttaaaagtaaaataaatgagtgaaattaactttaataatgtattctatttgatgcaatatatccaaaatattattttaacatgtaatcaatataaaaaattattaatgagctatttcctattcttttttatactaagcctttgaaatttgatgcatattttacattgacagcacatgtcaattaggattagccacatttcaagtgcttgataactacatgcgactggtggccaccatattggatggcacaggtctagcaggatagtggagggtggctaggggagaggacgaatggctgactgatattggcttagggcataaattaactatgataccaatccagcttgcccacttgcttgctgggtaatttttggcatggttcttactaatctgggtatctttaggcccaaagtaacaaatgaggagttagctttagcccctaggttccttccagctcaacaatgtagagattccagactcagggtttagtggatggagtcaacaacttggattttctttgctaaaaagcaccttggatagtacaatcatcttgtactgtcttgtacttgtattcgcataaggctttctgtggcaaccccaccatccacatctccaggggcctgtgagggtggctgtctgctcctgaggggtcaggggatgtatacgtaaggtagagaagggataggagaatcgccctctccagctctctgagaaaaacgtgcccccctcaaacacacacaggcacatacatgcatgcatgcacacactcaaacacacacacaagaacacacagacacacatgcacacatgcatacacaggggcacacacacacacatgcacacacaggtgcacacacaggcacacacatgcacagaggtaacagctgtgatctccgggccttaaggtgcaggacatgggaacagaaatacactcctcatgagtcagagggtgagtcagaatgttctggagagcttcagaagggagcagcaggaggggctcatggtgaggaagggagccaggtccctaggggagagggagggagaatggtcaggtttcccagtcataaagccagggaaacacgtcctgtaaggaatagggtctgctgccttgccaatttgggtcccgaaggatagcctgtgcaggggaatgcaaagtgaggggcattaggagaaggagatggccttttgggctgccaagtagggaaggattcagacaggggtgtataaagccagctctgtgagacagatcacctgacctccgtgaaggctcagtctcagactgtcgcactgcagcagcagtgtttcttgaagcctgggctgctgagtgagtgcatggttgttgctaacccatgctgaactggggaaactgaggaagaggccacactggtgtcctatttggcccaggttgggacaggtgagatcagttctgcatggcagggatctgtgggatatactgactgtagcctaatttaggcacatgaccagggctggggaacagctaagccaccttgtggggctgtcagagctcaagagggctcgacaaaccatcagatccaggcagcagtctggcagaactgggtgggaggacaggatgaggacaccttcaggaggagccagggataatctgcatcaggagccagaccaaccaaaaagggaggggactgagggtcttgacagatgcagccaggcttgtgaagtggcccctacagtgtggtgctgggtttgatcacctcctggctgacccactcaagcctaagggcagaaactaggctgtccctagtcaagactgattccaggatgtgggataaaggggtccctgcagaaagaacccaggggacccaggcatgggtagaggaaactgagtgggcagaaatggcccctccaacccattccccatctgccagctctgtgtgcacagtgttcacatcaccctgtcttagtttgggttccctggagagcagagcctgcgataaggcctttggtacaggtagttgatttgggagatgaccccaggaagtactccaatgagtactgaaatactccaatgaacatttccttcgagcatcatgtttctgctttaaaagtttcagattttggagcattttggattttggattttcagatttgggatgctcagactgtatatgggaatattactgagatccttactgtaggcaaagggggcttgggtgtaccaggatctctaggaagtgtacagaaggcctcccagaattttccacctgaaaaacaggaagctgggacctttatccactagtctccatggctttatggttgaaggctgcccccaagagggctcacttcctgccatcccctcccctgtaactctggagaaagctgtggggcaggatgaggaaagatgtggagtgcactggaggtgggagtcaggctgtgctgccctctcacagctgtgcacccctcccatggcttgaaataaacttcagactccttcccatggcttacaagtcaatttaagccctggcccctgcctgcttttccaaccccatctccctcctccctcccccttgctcataatgtcatagctacaggtactgatgaacagccatactggtcccctttccattcccagaaactaccatgctccagagactttgcatgaaactctgcaacacatggttacaatggtcaactccttctcaacctcaggtctcagaaaactatccccccccttagtgagatctccccgataaatgaatctacctgaggtcaaatccccctgtattctctcccatatcccaggaacgtgctagtaaatgttaacaaatcgttctcaaagaaaaacaaaagccctcatttgttgtgtctcctaattttcataatgtaaatattcccatcatggtcaatatcaagctagcaacatgtggtcactgaatatggttttaggcaaagaagtacaacaatgcacaaactattatatattattttcatcgtatagatacaatagaagtaaaataattgagtcatgcatttcatttttcattttgatttttatataatttatatgatttattatattatatattatttatttattatattatatattatttattaaaatacatattatttatataatttaatgtttataatggctgtgtttaactactagctcacaaaaacccctgaaaatttaacaattggctctcatgagctaatatgaatcagcgccaattcatatcaccaacttatatcacctgtgtgcacttcttaaaatgtaattatttttcatccttgctttactctttttatgagagccttctagaatgtgggttccttgagggtagaagctatgactctttttttctcagctgtgttcttagaaaccagcacaatacctaacctacaataggaatccaataactatttgttgaatgaaggcataaatgcatgaatgcatgggcaaatgaggtcaatagggttgggcatgcctcctgtggactgaagagggaacactcatcttgagtgacccatgttgaatgccacaagtcttgttggggtgcttatgacaggggtgggagcagaacaggcccagaggttccaggctggagaagccagaaagtggtaagggatatgaatctggaatcattgctgaaggctcttgggctcccaggggtagcccctgttagggctttatcccctccctacagcacagttggccccctggcaggtggggctctcagacacatccaaagccagcagagttctctatcccagccctccacatgaggctttgcatggagggctgagcaggccacctaggttcaaaggtttgcccaatctgctctggtatatctgggatcccaacaattcctgacacccaggccagctgcactccctacgtaggggtggccaaggacctggagaaaagcaagctcagcaagcctgtactcatcagctctccaacgtgtgtccgaccttctgccagcccctccagcctggaagcctgctgtcctaacaggagacacctgacttcacctgtctgcagcacccagcacaaagcctgagcaaggcagatgcagggaatgcttgcagcatgaacgagccaatgagtaaggcagcttcccagcagagcacatgtgaatcagcagtatttcccactcaggccagtctcaggcctggcactgggaaagagcacagaggtaccaggccagctgtacccttgactgcaatccagggtagtggccaagaacccagccctagagtcagccagactggggccacatcccagctttgctacctgggccttcatttcatcatctgtaaaatggggacaaatcatcatagcacctacctcaacaggtgactggaagaatcaaatgaaattgtgtaagtaagaggcttgcaaatttcctggaacagcaaaagagcacaatagatttagcctttaatttgtgaatacttatatagcaaacttgttgtgccaggaactttgtgccttaagccccttaggagtattaactcatttaatatcatgcttgtattgaggtcttaatgctacactatactgcctctcattgtttttttttcttttcatttgtttcattgattttatttggattggtttgagttgggttggatttttgctgttattattattattacaaaataagtttcttcctctcgtttaatctcaatattcttttccgtaaaatggggcattgggttaagtgacttctcatccaatgttttcattgctatcaatctcctgtttcctgcctcttggttcacaccagctatccagacctttctacatctccatctgcagactggatcctactgcagggacctgacccgggagactgggcttaggagccaagccccaacttccagcccttcacagcttgtgttaccaggagaacatggaaatggtggacatcttgctcaactgggaggctatggagacaaatggtcactcatccccaactagggtatatggtgccaattctggtctcactttcccattggagaaagtcctgaaggatcggcattttaagattaaaatcccagaactgccaagttcattcattcttcagtccataagtattcagagcacccactgtgtgctgagggctgggcaatgctttgggaacaagggagggaatgagacaggaagatggctgctccatcaagtttagtacagtgggggaaacagaaaataaacaagtcaacataaaagtaaactctaactcctttcagaaagcatcagaagctacgaagagtgtaaagcaggctaagaaaatggattgggctattcacaatagcaaaggcatggaatcagcctaggggcccaccacaagcagattacataaagaaaatgtggtatgtatatgccatagaatactacacagtcgtggccgggtgcagtggctcttgcctgtaatctcagtactttgggaggccaagacgggcggatcacgaggtcaagagatcgagaccatcccggctaacacagtgaaaccccatctctactaaaaatacaaaaaattagcaggacgtggtggtgggcgcctgtagtcccagctactcaggaggctgaggcaggagaatggtgtgaacccgggaggcagagcttgcagtgaaccaagatcgcgccactgcactccagcctgggatgacagagtgagactccatctcaaaaaaaaaaaaaaaaaaaaaagaatactacacagccataaaaaataatgaaatcatgtcctttgcagcagcaacagggatgcagctggaggccataatcctaagcaaattaatgcagaaacagaaaaccaaatactgcatgttctcacttataaatgggtgctaaacattgagtacacatggacataaagatgggaacactcaacactgaagactactagaagcggaagggaaatggggcctgggggttgaaaaactacctattgggtactatgctcactacctgagtggtgagatccatacctcaaacctcagcatcacgcaacatacccatgtaacaaacttgcacatatacccccaaatctaaaataaaagttgaaattataaaataaattttttaaaaagacagagtggctaggaggatggtcagggagggatcttgctatggaagtgatttaggagctgagacccaaatggggagcaggtagagagctcagactgttaaatgagcaggcctgggtggctggagtttaggaatcaaggtgtgtgtgactacagagaccatgtaagtcatataaggactggtaagccatataaggagcttggatttcttctaggtgcaatgaggagccaatggagaatttttagaaggaaaatatcagcctttttacattgcattttatttgcctgtacacaagacttattgcataatttgtggggcccagtgcaaaataaaaatgaagggcccttatttaaaaattattaagactttgaagatgtcatggggccctcccaagcatagccatgccaacatggctgcccatggagccagccctgcccatacaaaatatgttggcattaataaagctttatttaaattagcaaatatgtattgatgacctaaaataagccagacaccgtgccaggcactgggggtatgaaaaagtgaatgatcaaatgaagaaagccattttgaccttaatttttcttttgattcactccacacacaaaatgccagcggactaacccgccttcacatgtttaatggtgatcagacccataaaggttcaggccatcctttgaatggatttgacttgattccttagtaataatgggaaccattattgcacatccactgtgtgtctggcatacatgatttcacataatctccccaccaccagccctcaacaagaaccatgcaaggaaagcacaaggtgagaaatcaagctcaaagaagagaattaacttttccatgttcattctgcttactggtaattattggagtggggatttgaacccagatctcgttgaatccagagtcctccctctctaggtgcacaatcctgcctcctgtacactgtgtattcaaatggctgctcaaactaaggatttagatacaaccttcaataatcttgagagtaattaatgtctgtggaatatttactatgttccaagccctacactaaactctctgtgtagatcttctcatttattcctataaacaatccccttgtgcatatagcactatctccatacttttctagtgggaagaccaagactaagaaaggttaagtaacttgtctgattcctcccagataataagcaatggagctgggagagaagccgagctgggagagaagcgaagctgggcagcccaagggtctgagtccttgcttctattccctgctacttcttttcctctgcaaaagctatgcagatcttgtttctgtggccagttggtcactttcctattggaaaggccagagctcagaagtccaaagagcctggcccagggagaaggtgtgggggtatgacctggtgtcaacatcagggctgaaaattgcttcatgccctgctcaagaggaacaggaaggtctgacttctcccctaaccatgggaaagagttacttttctaaaaaaagcagggccagaaacatgagtgtgaaatgtcagggccctttctacctcagcgtttccttttgtcttggccttttcaccaatggaaagagctatcttgaaagaggaagatgtgctcactcttggttttctaaccaaggatctgagagacttccctaaagaaaagcgccaggcaggaaggttctggggctgggcatgcctgggaaggctgggcccctactctgcactgcaacctcacagggactatcaagtcaggactcttcggccttactctggtattgcccagaagaaattattagagaaaggcaggcatctgtggatgcctcctggtacagcccattgccctcaagacacagaaaatccaagcgccaggggaaatggcagcacaggtccagaagcctctgtcagtcccagctgtgctctggtgtagtggactctggtgtcaggccaaggctgcatttcgacaaactcagtaggaattccacaatgctactcaattattgtgagacccatgcaagtccacaaatgactttggttctcctgatccttatttttctgaattaagtgatgtaacttgtattaagaaacatacaaatagggaaatctaattcttggtctcagtgaagttgcagaagagcagctgagggaagttgtgaggactaagctcaagggtgcagaattattattacctgataacatagcatccagctgaattgctgaatcttggggtctaagttttgtaaaagaagaactacatgccctttcataccagaagtcccccattctcatattcttagcattgatttgtcttacatctctatttcaagtctctagatctctaagagtgtctatctattgcttgtacttcattgcttttactatgaagtcttcaaaatttttaggttccaaatttctcccttcaaaacctcgtagcggcttctccatctagaagaacaaaagaaaagtctgtagatagccaattttttatattctttttaaggagcattttttcttccttgatgcttctaatataaaaataaattatcttcataattgaaatatttttgccagaatgtttcaggtgagaattcctttgaatttatttttacttggaatgttgtgaatcttttcattttgcatgctcaatgaagttttatttaagtattaaaaaaaactatcacttattaagcattcagagtcttatgtgaggcacttttatagattaactcatgtaaatcttaaaaactccttatcaaaaagtgattaataagtatcatgactaaaagtaatggatgtctgagtttccatccaggaaaggtctggtaggagcctttccaaccaggtcacctggggcatgttacccaagcactctgagcctcagtgttctaatctgtatgatgagggtagtaatgatacctacctcattgggcggccctaaagactaaatgaggttacacaagtaaaacatttaaacaaatgtttaataataataaacaaattcccccataataaacaaattccccaaaggtgcagtatacaaaatcaacacacaaaaatcagttgcattactatacactaatgatgaaatatccaaaaagaaattaagaaaacaattccatttatatttacaatgatatcaaaaaggataaaatggatcaagtgcagtggctcacacctgtagtcccagcactttgggaggccaaggcgggaggatcacttgaggtcagcagttcaagatcagcctggccaacatggcaaaaccctgtctccactaaaaatacaaaaattagctgggcatggtggtgtacacctgttagtcccagctacttggtagacaccagaatcacttgaacccaggaggcagaggttgcagtgagctgagatcatgccattgtactccagcctgggcaacagagcaagactgtgtctcaaaaaaacaaaatggataaaatacttaggaataaacttaaccaaagaagcaaaagatttgtatactgaaaaccccaaaacattgctgaaagaaattaaagaagatgcaaataaatggatagacatctcttgctcatggattagaagacttaatattgtccaaatgtcaatactactcaaagcaatctacagattcaatgaaatcgctatcaaaatcctaatggcatttttttggcagaaatgaaaaaactcatcttaaaattcatagggaatctcaagggaccctgaacagtcaaaacaaccttataacagaaaaacaaagttggaggtctgatttcaaaacatattacaaagctacagtaatcaaaacagtgttgtactgacataaagacaagacacatagacaaatggaataaaataaagagccagaaataaatcctctcatgtgggtcaagtgatcttcaacaagcgtgccaagagcattcagtgaggaaagagcaatctcttcagtaaatggtgctggggaatctggatattcaaatgcaaaagaatgaagttgtaccgttaccttataccatatataaaaattaactcaaaataaagacctaaacataggctctgaaactctaaaactctcagaagaaaacagggagaaaagcttcatgacattgagtttggcaaggattcccaagatacaactgaaactcaatatgtttgaaactctaaactctaaaactcgtagatgaaaacagggagaaaagttcatgacattgggattggcaaggattcccaggatatgacaccaaaagcacaggcaacaaaagcaaaaataaatgaatgggactatatcaaatttcaaaacttttgtgcatcaaaagacacaatcgacagagtgaaaaggcaacccacagaatgggaggaaatacttgcaaatcatatatctgttatggggtttatatccagaatatatacagaactcctacaactcaacaaaaaacaaagcaaaacaagaaacctgatttaaaatgggcaaaaaatttaatttaacgtttctccaaagaaaaagcatataaaaagatgctcaacatcactaattattagggaaatgcaaataaaaattgcaatgagatatcaccttacacccactaagatggctaaacttttttttaaaaaagcagaaattaatgaatgttggtaaggatgtggagatattagaacacttgtgcactattggtgggaatacaaaatagtataactgctatggaaaacagtatgatgattcctaaaaaaaaataaaattaaaattatcatataatccagcaatcctacttctgggtatatatcccaaacaattgaaagcaagagctcaaagcagcattattcccaatagccaagaagcataagcaacccaaatgtccaacaacagaagaatggatacacatacaatgaaatactgttcatccttaaaaaaggaaatcctgacacatgctaccctatggatgaaccttgagacattatgctaaatgaaataagccagtcataataaaacaactactatatgattctatttatatgaggtatctaaagtagtcaaattcatggagacaaaaattagaatggtggttgccaggggctgagggaaggggaaaatggagagtttctcaatgtgtatagagtttcagtttagtaaaataaaaaagttctggaggtccattacacaacaatgtaaatgtgtttaaaaatactgaaatatacacttaaaactggttaagatggtaaattttatgttataggttttttaaccacaatcaaaaataacaataaggtaggtcatgatggttcatgcctgtaatcccagagctttgggaggctgaggtcagaggattgcttgaggccaggagtttgaggctgtagtgagtgacaatcgcaccacagcacttcagcctgggcagcagaacgagatcttgtctttaaaaataatttttaaaataaaaataaaacactgcacctggcatataatagagattctataaaggctgacttttatacaaatctcttttcctaattaaggaaacaggagttttaagaggctgagtaacatgccccaaatcatacagctagtaagtaagtggtgatgtgggaatttcaactcagtccaacccaaagtccatgcatgaccttaaccatcagagcacaacgtttcatgcctcgcatctgtttgccatacaggaggctgcgaatgcagagaacttcctcttctatcagtcatctagcacagggaacagaatcgaggctgaaggacagcttcaagccccttctccatccaagctttgagatcaataggctttagcccctctgaaccaaccatgcttaaagtttcagaagccacagcagctggcaggctgatccacacacacagatttcttactaacatcatgttcttcatagttactgctgctgaggaaataagcccactccctctgatagacagaaatcagacaatataatgatgaaaagctaccctcagtctccagctcaacactgtttcaagcagcaacaataggcaaaacaaaagtgtgaaattaaatctacttgctatccctggaagagacaaacaagaaaaaacatacatatagacattgaaatattgattcttatgtgcacaagcacaagctctgtggaagcacagaagaaaaagtgaatcagcctgtaatcccagcactttgggaggccaacgcaggcagattgcgaggtcaggagttcgagaccagcctggccaatatggtgaaaccccagccctactaaaaatacaaaaattagcccaggcatggtggtgcgtgcctcagtcccagctacttgggaggctgaggcagaagaatcacttgaacccaggacgtggaggttgcagtgagctgagattgcaccattgcactccagccggggcaacagagcaagactcagtctcaaaaaaaaaaaaaaaaagaaagaaagaaaaagaaaagaaaaagtgaatcagccacacaggcagactgtctcagagaaggcttcctggaggagttaacatgggcactgggtcttgaaggataaataggggttggccatgttaaaaaataaattaatttaaaaaagagagggcgagagatatgcaccaacagagaccaacagacagagaaatctaaagggacacggctgaggaatagcccatcatttacatcattacctattcattcattcattcattcatttgttcattcaaaaaagtcagtgaatgccaaatacatgctgaccctgtgctagcttactaagaaagcaaagctgattctaacttccagtagctccctgggtacttgtgggacagtatgggaggtgtgacaagggtgtttccagtggatgggggtgaggagaagggattctatctgcattgcagatggaaaaagagggtgggttttgagttccattttgggggatagaagatttaagattctgtgactgattatattccagggatgggggaaagagaaatctgggaaactgtcagatctccagcataggaaatcaagagaggggaatgaatgagagtaaatatgtttggaaagttaaaaactagctcaactttaaaatcaactttctaagtttgtgggcctagaaagccttcagactacaaaggccatgagggcaagaataagaattgcagcaccttgaagggcacacatccctgcctggaggacctaacaccattatgggggtacacataggtgctaaggaatacttgatgagctgacttcctaccacactgtgcttcagcccagtcttactcagcaactgctctgcaagacatccagatcatggaaagccaggtgagcaaacccgcctttgtccacaccccaccagagctccacactgtaggtaccagaagcttcctgggcatccaggaatgacacaaaactgtttctcttttcaaaaactgaaatgctcccaagattgaacgtgcggaacgcttgtgcagctataatctcagcaaacatctgccacctttgtgtggcaaatgcagtctctttagaatactgcctttgattttggggaaagacaaatcaggctgcacgttttgttctgaatgcgtctcatcacaggaggaaattttcagcagcttggaattctgaatgtatgaaaaatgattttttttaaacaaagagttcacgataaagcatcaacaaggttcctaaaagagatgaaaccagttctctattcccatccctttcccctcccacgtctcgtctttttctggattctccaaggtctttctctggagctgagtctcacttatattgccatttgcagatctggggtggcagctcttctggcctcagagggttaggtcaagactgccagtggcccaagtcatctctacaaagtgtgagctacagaataagccagagtctcttctctcttggtgtcagacctcactggtgtttgtaaatcatcaaaatggaaaagcatttgtgctgctggggaatggacctgagatgcagcccctcacttcacagcccagtaataaagagttggtgtaaccaccctggaagcagcaggtggggaggaacagcattaggctgacctgggttcaactcctctcttctctgccgtctagctcagtgatcctgggtgggcaccttgaacctgctggatctcaggtttaccatctgtaaaacaggccagattaaagcctgccttgtcatcagaagcccataggtgaatgtgggcacatctgacttgcaaacaacaaagtgaagtgcagatgtagagtaatcaactgtccaggctcacctgggactgaagagtttcccaggatgtgggactttcaggagagttccagacaaaccaggagtgtggatcaccctatgtcacccaaagctagcaaaaccccatcatgacagggataagaactaaggtcgtcaaaggggtataatgcattttctggaaaaatgcacactgactgattcactaaacaaaatatcctgagaattttatgagagggttaagcaagaggctttcttattctaatttagtcctccattcacactggagagttcagtaaagctttacatctatttcataaataccggcatcacttcacttttgctaacagggcacccaaaagcataatggcttaaaacaacagtcatttatgtacctcacaagtcagtggatcagcaattgggctgggctcaacgagggacttctcatctggactcactcatgtatctttggtcaccagcttgtgcatctagggctggctggactaggagggcctcagctggaaaggcatgttttggctccatatggtctctcatcatgcagtagccttgttcacgtgacagctaggcagcgttccaaaagagtcacagcccacaaggcctcttgaggcctcacctcagcattggcatagcatcacttccaccaaattctgttgtccaaagtggatcatagagccagcccagattcaaggcgtggggaaacagactccaacttttgatggcaggagctgcagagatatatttcagaggggcgaagatataggaggtgagggggagaactccaataatttttgcaattgacagtatcttcctttttattttataaaacatagaaacaaggtacttcagtagctataacaatctattgctatatcattgccatctctctagtcactcaagccagaaaccttggaattctcccaaccggtctctgcctcattcctgctccctctacacccaaccaggccctgccatctccaccatctaaacattcatcacataattccctgggattattcctattcatgctccccacctccagcctcaccctctctaatccattctcctccccacagccaggatgatccttctaaagcatgcatttgaacatgtcactctctttactgaagacttgattagctctttactgctgccaaattctacctatcaaagcctttctactttctactccagatattccaccttcatcaccaccgccaaatcactactgtggcacctaaactatgttctgggcagagtgaactatttagcttttcttaaacaaatcatggcttttcatgcatttgaaaatgcaactcaaacttacaggaatgtttcccaagacctagatatctgttatcagttaaagctagactgcaaactcacctgcatgcctagaggactatctacttgtacatctttctatctctgttattggatatccccaaagataacacaaaccatttattgttcaatgactttgttggtgaaaacaacaacgatgatgctaaaagataaatcaagcatacagattgcttaatggaaaaagttatttatagtcagccttctgtatccaagagtcccatatccacagattcaacgaacctctgaccaaaaatatttgaaaattaattaattaaaaataacaagacatcaataaaaatgacacaaatagaaaaacaacatagtgtaacaactattttgtacttaacattgtattaagtattataagtaatctagagatgatttatagtatacaggaggatgcgggcagcttatatgcaaatagctacaccattttatgtaagaaatttgagcatcctcagatttgacatctgaaagggatcctggaaccattcccccatggataccaagggacaactccctactcacccttgttagttctggaaaatagttacagtggtactagggcaagcaattgatgacagaattatagagtccttctgggcgtaagacatttgttattcatctgagcccatagatgaaaacttgagagccactgaccgccactatcatctggaaccagccctcagtacctctccagtgggcaactgcaacatccttctcactggactcctcacttctactcttcacctttcaacaatccgttctacacatggtaactagagtgatccttttaggtaacaaatcagggcagatcaccttcatgctctaaaacctgcagtacttccccaatgcactgagagcaaactcttccatagcctacaaagtcctacacaatctgcccctgtggcctccacagtctcatctatcactctccccgtcacttgctgaaccaacaccctggacttctttctattcctcaaaaatgcattcacaggacccacacgtggctgatcccacagctgcccccaatcaccatctggacttttgcataactgtctggctccaccaggtccccctcaaatgtgacccctcagagagcccttccccaatgtcattgaaaactaacactgtttgcaagtttgtttccttgactattgcctacctccccaactggagtgcaatctccatgagacctgagacccaagcttactctctgtacatcttcaacatccaaaacagtatactcaataaaagttggctaaaggaatcaataaacaaatgaacgacactactaacaattatgaaagaaagataggtaagtacttaatcagaataaagataaatgccacctctaactcaatagaacccgcctaccacctctacacaggtgagagaaacccctcccagctccaggctcagaggcctctcgagagaatatgttgtcttagggctcaggtgaagccctttcaagctggcttttcattatatctctttaaccacggtgataagtagagccaggttcccctcttattggtaggaccaaattttctcactcaaaaactttactatgaaagaaatggaactcaggtgccttaactatggcctgatcaaaacttgacaacaaagaaataaagcagcttaaatgagttctggaattggctctctaaagaccccagcatgggagagatgcacacatatatctaatgcccaccagcagctacacttgcatgtcccacagggtctgagactcactgggtacaaggcaggttcattatctgggtacaaggcaggttcattatcttcctccctacacccacccaacttctccctttgtcagtgtcactgatgtctctgagtagccaacatcttccagttaccaaaccagaaacctagaagtctccgtggacaattccctttgcctcaagtcccacatcctcctcatcctcccctctaagcccatgttctggttcccatctccatactcccactgtgtccaaacagtcattattgtctgccccctagacaatcacatttgtctcattgctggtctccccacatctactcagacatccttcattctccccgcagcagccagaacaatattttaaaaactaataataagcatgtcctacagcttcttaagtgcctgctatgccttccatttttcttagaatagagggtaaaccctcaccttagcctgtaaagccccatatagtctaccactgcccatctgttcagcctggctcacactctgtggtcctccaacttccatgtcctcaccctaagggcctccttttagttctaattctcttttttagttccaactctctttacaaagactttgcacatactggttactttgtatgaaaccatctcccactaccaaccatgagccaccttcttgtccattcttcagatccctgctcagttttacttccatgggaaagtcttccctggccatccggtctaggacaagtctccaaagaatgatagtttttcctttaaaacacttatatctgtttataattatggattcttggcataactatatgactataaactccagagggcagagacttgtctccctttgtgctgctttgtatgcccaatgcttagcacagtacctggcacaggatagatgctgaaaacaatgaacgagtgaatgcatgaatgaatcaaggaactaggaacagctattctgtggagttcagctcaccctccagcagctggccaaagtcccatatttagcaatcctcatgagagatgggaggggtagataagctaggagtgaaaagtggaagaaataaactgagtcgttgaaagattaagaaccccatgctgaatctgcccttgtttccatgtaacttgcaagaacccactgtaatttacatatttctgcacgaacatagcgtgtaactgactcccaatcccttctagatggatgacacatttactgtctctctttgggaattttatgttgcatcctggattccttagaaattggcggagagaggtgggaagcaaggataggtaaaacaaacggggtttgccattgtcaatatgccaaagagaagagacctggtaagatctaagggatgttcccagacactcactttaatcatcattcctatgaacacacacacacacacacacacacacacacacacacacactattgctatgagaaagaagcaaatcattcagaccactaaagcaaatggtcctgaattacctatcagccagctgatatagtggcagttttcaccacataccaggcaccctgctaggtgctgagaatgcaacagagaacgggcctctaggcccagagcctgtgcccatggactacagagtggtgggggctgtaactttgaacaggctcacactgtggtgtaaacaaagctgagatggaagtgcaggggccagggcagcacagagaaggggcacctgacctggccttggaggtcagccacgacgtgccagaggaactgagagcaaagctgcatcgcaataacccctccgagcctcgacttcctcatatgtaaagtggagacagtgagtcccacttcccaaggggcttaagagtatctgattcaaaatcataatcgctggctaatacttaatgatcacctattttgtaccagccattgggctaagcacatcttgtgcattagctcatcaactcttcatcacaactctagaaagtagatacaaatatccccacgttaccaatgaataaactaaggtttagggagatgaagacacctacccaagtcgctggcaacccgggtctgcctgacaacacgctttgaggcacagcacttcaccacctcccttatgtaatcatgacaagttctcagcccaaaataaacctttagtgaatttcagtttcttttctcccttcgtcccctcctctcctttctccatagaggaaacaaaacaacaaagatcccagagtgctgtgactcgagccggtttccctggatttcatgaagccactttttctgtataaatatagtctttgaaaggacctagaaggggaaatcagaatattgagaattattcccaccttaataataataagtcaaattggtgagtccaactgaggcctcaaccttaacccaggggaggtcctggggcagatggctctaggctctgcttcctctggggctggaggttactaagtttaaagcctggttgccaacagatctcaacaatgaagtccagaaattagtaaagcctacaaagtgctcagaacacaacctccctgcagtcccccatggcttgtgttctataagatgcagatccagctgctgctctgctggcccatcctgaggacttggcaccatcccacccaggaatgtatcacttcactggcccagccctgccttcccctcttccacccatgcccagctcattcactgtatttcaaggcttgacctcatagaaaatgtatgtattcacccattttatttattctttcactcattatcagggtcctactatcatgcatgcatttgtggattccccattgtgctgatattctgagtacgtttgcagataaaattggaggaggagatctgcctcctggccagttgccgcattgctcacttgactgagagcatgtgtctccagctgtcagtcaggctcctccctgcgcttgattccaaagctgcagaggtcagagttataggactgggaggcttaagacactgggatggtggccctgccttctccagctcagctcagctcagctcagctaagaacaatcaaggtcaggtcagctcccagatcaacccaaggacccttgggagactctgcccccaacaggtaagggctcagagaacattgcttgttctcttgcacaggcagcaaggctgggtagttactgggctaaagggagccctggactcctgagatacctctaagaatcaatccccagaccatactctttgtcctgacctacatgctcagttgacctgaccttttagtctccagcaaagtaatggtgtgcacatggagtcagccaaacttgggaccatagcctaactctgtcatcttctagtttggtgaatttggacaaatcgctttatgcatctaatcctcagtttccccatctgtaaaatagggatggtaataataattgtagtacctgcttcacaggcttagtttgatgattaaatgaaataatcacacaaagagagttttacccaaagtttctcaacttcaaaactattgacatttcagtccagataatttttggttgtatggagtatcctgtgctttgtaggacacttagcaggatctctggcccctatcttctataggccagcagcccacctcctgctcagttgtgacaactcagtgtctccagatatttctcaaaatctcctgacatcagccctgcttgagaaccactggttaacctaatgccagaaaaataacaagttcaattaatgttagctattattattattgcccactggaacccagtctgcttggatggtctctggccctgtccagccctcaccagctccatagcctaaggcttatcctcaaccacaattttctatgtactaggaggaccctgattcaaggtatttggaattatggcacagtcaatagcctgacaatgactagaaatgtatctatgccatacaagatctgtctccctgggaatataaaggaaagaattggaggaggacaggagaatcagggagacagtttcccaaagcaatttagggctcagaaagagaatgaaaattggtgttgaaagtactaaagagcataaggaaaatgatagcattcaaccaatgtaataagacataaaagaaatagagatgataatatactattggtactgtcaacatggcactcagaacccatgatggtagatgtgttctgaagaccaaatgtgtttatggatgtaaaagtgcctagcccatgacctggcaaattgtagaccctcaataaaggtcatataaaactatcattcaggttgacattttttgtcagggagaatactggaccagatggaattggctcagcattctacgtcagaggtgggagcgatcattgagacaatgtgacccagctccttcattttacagctgaagacatttacatggagagaggagaagtagattgggaaaaatcacacagtatgtaaatgccaaaaactaaaattagaactaggttttccagactctacaggtggctacagtgcacatagatatacacacgtagatggctctgtcctaagaccagcacacttgagttacctgagagtcagactcagcagctgaataaaatcatgagcaggtgcatctgagtaatgtggtattgtgctactccctgccttctggccttggcatcccccaaacagtcatcctaaccctcttgactctgctaccctgtgttcctggcctcgcttccatttttatgcctctttcttctctctactctcctctccaaaaaaccctgtatcagactcatctgatcccatgagagtagccagattcctcctcatttggtttagcatctccttcctgacaacaactaacttgcactggatatgtactatgtgctaagaattgaatatgcattacctatctatataataacagtcactactattatctccattttatagataatgaaactaagcctcagtttcatgtacaggaaaggagaggcagagtgttaataagtagaattaaaagagactaacatatcaaaacactaactagggggaaacatgattttcctagagtaataggtagatgtggttgaatttctaaagagaatgaactagtttagtctgaagtccagggggaagtggcagctggcgaagtctcccagaattgtgtttttccttcatgtctggtaaatatgggatcaccaagtggatggggaatgggagggtagtgatgctgggcttcttggtcaatgggattcacagccatgcaatgacatctccctctctgcggcctccagtccacccagaggtctgtatagccagactctcatttgtcctcacctgtttcctaaatcacaggtggggtagggactacagggctccatctgtcttgacgcccgacctccagctcctgatccacttccgactaatccatctgtggagccatccaagactatgacccacttcccacagtgctcctccccagacaagcttccctgtggacggtcttgtgccctagtgttcctgcagcctgcgggcacaagcaccgcctgttctggacagctccgcccagcccagccctcacctgggtgttgtcctggactccaccctccccttccccatctcagcccaagacttctggctccatctgctctggcctagaaatgtctctctcacttgggcctttgtaacagctgcttttctcaatcaaatttcttgtccctgatatacttacctctcaaaaatgcaaatatgttaatatcaggttattgcttaaacacctgctgtgtattcccatttcttctaggataaaacccaagccccatggattgagggtcccaccctgaagctgaatctatcagactaggatttcttctgccaggtgagtctagggaagatgatgttgcttaaagtcaaacactagggctttgagacatttggccttatgctcagcaacctttagatggtagaatcttacatctaaaaacgaccctaaatcaacctgtccccatgcacactagctcttttcctgatcgccaccagtgacgaggcactcacgatgtagtgagacagcccattctgctgtgtaaagaactttcttatcacaggatcctagactctcagatttgtaacacactcagaaggtgttattcttccacccagtggaaacacttctctgcaataaatgagcaaataacctgatcaattttcttgaaatatccacactgtgatgtaattgtgttctggaatccaaatgcaggcttttgcctctttcccacataaatatcttccaccataaaaaatatgtttggtttctggattataccaatgtggtactcctctcagttgttttccagtcagaagtttcacccacttgcccaagggtgcagactctagagacagttacagatagtctaagttaaaatatcatctctgccatttgcaagctgtggaaacttggttgagttacctaatttctttaaacctcagattccccatctgtaaagatgatacctacctcctttagctattatggggactaaataagatattatataagctgctaagcacagcatctggcacatataagtgatcaataaatgttattttttattatttaaagtgaaacttttctctatgatgtcagtgatggctttcgaacattttttcctagaatcccaatattcaaaatagatgcagtatggctctgatggcagcatgggcgggcatcccagggtcccattgcctctgcctttcctgtccctatttcctcttcttcatggcacccctgtgccatgaaggggtgagacacccctatggaaccttaggactcttcccagtatagtttgaaaataaatgagatataaataaataaataaaatgtcataccaggaaaaggcaattgcagaaacacaggaatatgtattactttcctattgcttctgtcacaaacttaatggcttaaaaatacacaaattattatcttacagttttgtagatcagatgctcaatgaagatctcactaggctaaaatccaggtgtcagcagggctgtgttccttctggaggctctaggggagatctcttttcttgttttattcaagtcctagaagctacccacattccttggctcacagccccgttcctccatcttcaaaaccagtaatacggcatgtctcagacccccctcgccaactctctcttccacctccttctcctacttataaggacccatgtaattatattggtcccacccagataatccagaataagttccctattttaaggacagctggttaacacattaattccatcggcaacctaattccccttcttgtgtaaccttacataacacattcacatttctgaggattaggacaaagacgtctttggagaatctttctgcctgccatagcagtcactagagaggtccttagagaccagcctggaaaaattactcaacatttggagacataaacgtcctattcacctcgctacaatagtttgcagcccactattcttcatcttgttcttaattttaacatgaggatctttgacaaatcttgctacagtcaagatactctgtctggcattacccagacttaccagatatgaccatcctttcagggagatttgttgcaagcaacagaaaatgactggctagtttaggcatagaaggcatttgataaaaggttattttgaaccttgcaaagcctctggagggatggagaaccagtgagagatcaggcagccaagaacagccccccaagttatatggtagaacccatctgggcagaaattgttgctagtgtccctcaaaacccactggcatagacagaggattctgccttgagtgttgctactaccatcacccctagaaattcaattgataggtttgattcttcacctacagtcactgctctttggcatttcttaaacccaacttgaagtcataggtggctgcctctatgttatgtctttgtggtttccctgtcagtcttatttgaaaaacttggagggagaggtacgtcagaagaggactgaaaattctacatgttccatttcccagcctctctggccagagaactctggcagatgctctgaaaccttgaacacctgccagagtcctgccagagaggctgggaaatggagcacgtgacattttctgttttatggtaaaagatgggctccacatctcaccaagatccattaaggggcaagttcccctatataagtccaaatggtggagacataattatgataatagcaaatatctacagcaccagcctaggaagcttattttttaaaagagaaataaggacattttggaattactagttcttggtgaatctatcatggctcttattcctactgatccctacttctctttctaaatacacataacccatataccacttaagtaatcatttctagttctttgccagaaactggcctgaacccacaatttctagaatccaggttttaaagatcaagataagacatgcccatccctagtcttctggcatccctctccctccccatttttcaaataaggctgacagggattccacaaagaattgtgcaagtcttttcagaaccctgggctataattcatatagaactgaagagctgaattaattaagagcagtgaggtgtttgcatctctcctatctcttatcttgagtttcaatctttccagattaaaggccatttgccttgatgaattgagcagcttggtgatctctctgattactctcaacattacaccgtcatgcccatgctgtggactctcctgttcccacgatgtatctccaaacagtgcaataaaaatccttatttttatttttagtggtttttcaaaagccttcactcttcttgagcctaggctttctgacatgattcttataaacatgggtcatttctcctggggttttgctgtattcgctttcttaatatttgtgtctgtaacacccacacccatcagagatgatgctatggagtcacattgctttctagttcactcatctctggactatacaatggaaggaacatggatgttgagatcagatttagagtacttgaatcctacctatatctcttactagcagtgtgagccttatctctaaaattaaggtaataattcctgctcactcttacagagcttcacaactggatatctttgcggcagtaccttgtgggcatgcttttattgaggttttcttgggttttttccctttagtaaacatacagttttacccgtttgtcgaaactcctgttttcacatcccttaaaagcagatggacagaaagctaccaaatttagagggttctttgagataacccaacataaaatacctgtgtgtgtgacatatatatgaatatatatgtcttgtatatttgttctgtttctctggagaatcctaataacatctctttgtgtactttattttcacatatactgattctggctagttttatatgccccactatgagaaaaaagtatcaatgctatatttactcatgatgccatggcacttcagaacctgtttgttcgggaacaatatatatttccatgcctatgcagttccctagtagcattttttaatgccagttacatcattactcacaatgctgcatcatctgctgtgccacctatgaatactggcttccagtgactcaagaagttgttactaagcttcattgattaagactacaaatgcaagtcttactcagaatatgtaggaaaatgtgaatgataattcatttttcacttatgtcaaatttgccactcagaattttacacatagaaaaaatgtatcttccaaccatgtctggaactctctggtctacaatcactgcatttttagaatgtgatctctttcagtgttgaccacattactgtctttcattcacaggcatcagtgggagcacaggtgggggcttatggaagaagtaagaagagtggctttatttacacaagaaatatctaccccttgccacatggcttacgatcaacccagaaggccacattacacatcagatgtgtaatagggcattgcaaaatagggcattggtgagaaggattcattggcccatctcaaaagcccttggagtagatagtcatggccacctctggcagccatcctgacatgtattaaggagcccattcagtggggtaaggtgactgccttgggtgtcagcagtgaaagttgcacaaaagtaggggaatagtggtaaggagtgaggtttgagaggtcaacaggggtcatagatcagcagggtcaagtaaaaaaagggctggaaggatgggcaacccaagcagcaggaactatgtgtggaaaggcatggagctttgaaaggagaaggtgcatccaggaaacatcggttgctcccttgtggctgaaataacatgcatttatggaatgtcatgatagaaagttgggcacaagagcaaacccagagttcattagcttcatatgtcaagcaagagaatttgagctctatctgtaagtcatgaagacttcatggaatatcttaagtaaaagatagacatggctggaattggggtttcaggaaaaacactgtggcagcaatgggaaagtcaaactggaagacagagaaaccaaatagaaagaggttattttaattaaccaggagatgatgaggattgtctctgaactcgataccaactgaacttgggaaaggagctgttgggctggagagaacacagtagactctaacatgtttcaggggccaaacagacaggatgttgtgattgatgaatgtaggaatgaggattggggaggagtccaggatgactcccagcttctacccatggtgcctgggtggagagcagtgtcattcctgaaacagggaacacagaaggagcaagtttggcaggaaaggggatcaattcaggctggaacttgctgagttaaaggagctgcaggacatagaacaggaggctcccagaagacaaggaacagattcaaaagttgggagtgaagtttggcctcgagaaagtcatggaacccagagaggattctggaatgagaagagagctaagaggaaaacctaagaaacactacaatttaagaaatggttatggtataaaactcaagaattgaaatacagaagaccctaggaggaaagtccatcttccaagtattggaaaccacgcccaattccttggccaagttttcacaatccactatccacacacacccatattccctcttttcttttccaatgacaagtaaaaacacaacctgcatcctcaccacatgtacaaagtcctcgtacaaaatttctctagagcctaacatgggtgccctcttgagtcaacaagaatgaacactgccagtaagtttgtagaaagttgacttcaagaacatgacacatgctcacagtaggatattgccaaaggactggtcatgagagccaatcagtcacagccaccagccctgaaggacatgagtccaggaacctagagtttagacctgtaagcaattaagggtagaaagatcttcaatttatttttctcttccccattttcaggcagagaaactgatacccagagaatgaaaggattttgtccaaggtcagcagtgaaaccagttgaccagatcagtgtgactaaattatgtcatgttggttaaaatgtcctaatgggcagcacatttctaaagtttctgccaatgcaaccaggcaccatgggcacacttcagaaactaatgagtctgcaattcctccagctcattcagaagctcctgggataagactcaatcctggtaaggcatgggagactgaagaaaaggtagaagttatcacccttcatagggcttaatggactgtggttgtcacatatccctccctctctgaggccactgggatctgaatttgtcctgggcaggggctttggggtcatttaattatcataccaaggggacccaacgagggaatccaaacttgtcttgaaaaagtgattgtcttcaaaactagcctgtgtcagaattttccttcccaaaaatagctgtccatgggtttgcattttcacagctctcttctaggcatcggcttctggtctgaccttggttcaggacttcccctttagatggatggatccagatgggtctttctgaaacccccttttgacaatatcactctctgctcgggagaacccagtgctctcctccacctacatgcaacttagtagacatcctagccacagcctgagcctacagcttttccagccattgcttctttttggttccctcaagttctgtcactttgggtgtcttccagttccctgagcacaagaggtatttttaggccccagtgcctttgcacatgtttcctggaataccgttttccttgttatccactgaaagcaactcccatgtattcttatttatttaaattttttgcatccagactttgaattcctcaaaaacagtaactggtgtcataatcaccttgttatccccagcacatagttcaggatttgtcaacatgttggaatgaatgcctatgagccaatcagactacttgccacagtcaggaggaagaggaaggctggagtagctgtgaatagtacaagatgaacctccttatgagtgtgaaagagggggagcatcaacagagttaccatgaattgacacagtggccatgtttccacctggtggaggaatccatttttaactcaaaccatcctcgagaagttacttttcctaccagagaggtggcaggctaagaataatccccttcattaatccctcccaacaacttgaataatggatggaccacagggagtttagaagcccaggttaagtttatgagttgtaaatgtagctctgggcacactgggtagggagataggggtggtccctcgaacagaaagccagggcaactatttcccagaataaattagaagcatatctccttatgaatactggggaatgccattgatgttccataaagtaaactttggtcaaaacatagcagaagctggagattttctgcaaacaaacagtaatgtgaggccagacatgtgtaggcaagaagagcaaggtatcttcagaaggaagtcagcagtatttccaggaagaaccagaatataatccattctctgggctgtttctagccttgggttttcacccatagggacagtgaaatggcagcttatatcaggctcttgtataccccatactatatcatgggtagttttttctgtactagtgtcctcaagttgtccacataggtttctcattctagaacatgagctcagtattctctattaacatttttgtggttaaagtcctaaattgcagtctctccagctactacataaggatacccgacctgagtgcctctgacctgacacatgaaaacaagatttggatgcccacatggacattccttcatttaacaagtatttgttgagtgcctactatgcaccagatactgggagtataataataaacaagagaccctgtgttctgggagttgatagtctaaggggaaaagggacactgacaagcagccagggcttgcaatacagtctatgcacaatactctgtactgtgatggggcattagagggggccacagagactctactttagaccagtagggtcaggaaaggcttactggagaaatgatgtccatgctgagacatcccattagacaacgtgaagggaaacggaaaacaaggcatgctccaggcatataagctaggcaactgcatgtgccaagacctgaagttgagagacagtgtggcctgttaagggaaaatgagaagagcaggacaagtccaagtatgggcccagcccagttcagcccatctatacatgtgttaccaaggaagagaccagaaatttgggggcacagctcaggatcagcccccacctgatactccattctcacctcaattgtggatgtgaagtttcagcttcaccagggctgcaaggccaaatggtccttgaacccccaagcccagcagctcagaatctcccaggcttcatgacgtaaggaagagtaagaggaaagttgcagccatgacccgagacccttctttgccctgcctggtttcctgctctgtggtggcttcatctcagcaagaaggttgccatcttgaatgggaatggacattggggtgggatggggtgggtgttggggagggagacccaaacacctgtccaatacagtcaaagaagctggttgtcaccatgtgatcaaaaaaagagacaattggctgaatttcagtcacattttctggaggtttgtagacgtcgtagaggtttacaagcctccacaataggtagaggtatccgtctggggcaggtgccccagacagcctcctggaagtgattactccactcaacagccaagaggcatctcctaaggaatgtgtgttgtttcaacctgggattggaagaagggcaaagttcttgaacaatatttcatggtttacaaacatcttgaggtttactgagcacttgtgcaccaggcttctgctaggtattttaatatctagcatgaagttggcttctcatgacagccctacaggataagtaatatatcccagctttcagatcaggaaattgaggcccagggaggtgtaagaaacttgctcaaaatccaccttgttgagtgacagaaggagaatttaaatcctgacctcctgcttcctctcacttccatccctgcattatcttatgtcaccatctcgagagccatggtaaggttggcaatattagtagtttcagataaaaaaaagcaaggcttggataggtggcagaaggtaccagaaacaggtgtttccagctgataaggttgggcccgtcagcacattttctgaggcagctccccttgctgagcaccacctcccacaatttcattccaacattttaatgaaaaataaacgtctgtccacccctaccctgtgcactaggccagatcaagcaattacacagtgtttgtgtgggaagaggactggttctgagagaccaagctgatagggaggggtgatagcagagaaaacccagctggctcagttgggtcttcccaggacccctcgtgcccttctcccactgccctttccactcagaaacctgcccccactgcccatcctgcctgggtgaggcaggatccaccaccagggtccaggcaggaccctggaactaaggattttacatgctttccaacccaactctaacacaaggccatacagcatagtggtgaagggcactactcactcactctgaacttggacagtggctccatctcttagaacctgtgttgtcttctgtgagatgaggatgatagtagcacccagcacacagggttaaatgaaaagagagtcttgccagggacagttacatgacaagtgctcaggaaacactagtcacttgtctccatttttgctttttattgaagtataatgaacataccagaaaatgcataagtgcatagctcactgttttggacaaattgaacacacctgtggaagcagcacccaattcaagaaacagaattctcagcactacaccccgactataccttctggttactatttcctcccaagaataaccccatccttacttcttacagcatagataaatttcacctgtattaaagatggtactacttgagcaaagacatggaatcaacccagatgcccatcaatgataaactggataaagaaaatatggtacatatactccaggaataccaggcagccataaaaaggaatgaaatcatgttttttgcagcaacatgaagttggaggctataatattaagcaaattaatgcaggaacagaaaaccaaataccacatgtcctcacttataagtggaagctaaacattaagcacatacagacatattataaatatgagaacaatagacattgtggactactagagggtggagggagcaggggggatggggaatttttataagtatttattggatactctgctcactacctgggtgacgagatttgtactccaaacctcagcatcccacaatatccccagataacaaatctacacatgtatcctctatatctaaaataaaagttgatttttaaaaaaagatgctaccatttgttttgttaactataatttaaaatgcaccaggaatatgcacacattctttgggtgtgttaccttatttagtcttcatcgcagccctctgatgtaggtatactcacattatccccatgtcatagatgaagaaacagggaacattctatggaatctgcaaaaatgcaggtagaactgcaagtaagtttagcaagatcacagcatacaaagtcaaaatacagaaatcagttgcatttctaaatactagcaacagaccattaaaaattgaaatttaaaatattatttacaaaatatttatacatacattttaaaaccatgaaatacttagggataaatttaacaaaatatatataaaaactacacaatcaaaattataaggcatagctaaaagaaaattttagaagatttaaataagtgaaagtatatactgtattcatgggttggaagactcaagattgttaaaatataaatttattcctaactaacctataattttagggtaatcccaatcaaaactccagcagacttttaaaagtaaattgaaaaattgattctaaaatgtgtgtaaaaaaacaaaggccctagaagagccaaaacaattttgcaaaagaagaacattttgaggactttcaacacctggtttcaagacttccagtaaagctactggaatctaggcagtggtattggcataagaatagaaaagctgggtgcagtagcacaggtctgtaatcccagctactcaagaggctgaagtggaagcgtcacttgagcccaggagtttgcgaccagcctgggcaacatagcaagactccatcttgctaagaaaaaaaaagaataggcatacagatcaatgaaacacaacagagagtacagaaataaactcacacatatacggtccctttggttttagacaaatatgccaagtcatccaatgggacagggataactgtttctacaaatggtgttggaataactgaacatacatatgcataaagaataagtaaatataaaaaagaagaatcttgtcctctacctcatgcaacagataataattaattcaaataattgatcacagacttaactttaagagttaagactgtaaatgttctaaaagtaacagaagatctttacaagattgggataggcaaatatttcttatatagaacctgaaaaaaggacccattgtaaaaaaatgataaattggtcttcatcaaaatgcaaaaatgtcttctctttaaaaggcaccattaacataacaggctacatatgggaaaaaatatttacaacacatatgcttgacaagagacttatatccagagtatttaaagaactcttccaactcaatagtaaaaagaacagcctaaattttgtaagtaggcaaaatgtttctcaagatacacaaactgtcaaagttcacattaaaaaatcattagtaatcagggattggaagtaaaaagcaaaatgagatcatatggtatgtcaattaggatgactaaaattaaaaagactgacaacaaaaagcgttgacaagtaggtggagcaactggaactctcatacgctgtggtgagaaatacaaaacagtacaaccactttggaaaaaattcaggcagtttcttacaatgttaaacatatgtctactatataacctagtaatcttacttgtacctatttacccatgagaaatgaacacagatgcccatacaaacacttgtgtgcaaatgtttagcacaaatttattcatagtaaccaaacactggaaaccacacaaattcccatcaactggtgaacagacacacaagtttttgtatcatccatattaatagcatcatactcagcaataaaaagaagcaaaatactgtactgatacatgccatcacaagtataaatctgaaaaacaccttactgagcaaaatgagccagaatacaaaagaataaatctatatgattttatttataagttctagaaagactaagtttaatctaaagtaatagaagaaaaatcagtggttgcctgggtccagtggtgggagataggggtggggaatagggagggagtccctgggaagtatcacaaggagacatttaggagagatggaaatgttccatatattgattatgattgtagttagtgtgttaatgagtatatccatttgtcaaaatttattgtattggtcatttaaaatgagtgcattttgtcatgtgataattataccttaattattaataaaataatttaaaaaaaaacaaataatgaaagctattggttttattattattatttactatctcccaggaactctgctaagccctttatgtgtaccatcttattcaatcctctcaacagccctctgatctacgcacactaacatcatgcccattttacagaggagaaaacagaggctcatggaagaatgtgaaataatgtaaccaacgttccccactaataagcaatccaggattagaatttaggtagtcttaatcagcgaatatatggctttcaaagcatgggaaaatttctctgtgtacacttgagtaattatcagtacataaatgattgttactaataatgtgcttgtattgttatttgcagaggtggtacttcaagtccacccctgggaatgtcaatatcatgggcaagtggggtatctttaacttgaaggacagcccagtcagggactggagagaatgtcagcaccccagctggatcagacaaatgctatcataggcctcagccaaaagagagctgggtagggaaactgaagggaaggtgtgcacataggctaaaccatgaaggacatgagcatccaagaaacacacacacacatcaggcctggggctccaagtaagagagaaaactctgaaccccacccagggtggggctaaggttcctaacgcacttcctgtacatgtcagggtgggtcaaggattgggcagggctgggtggggttggaggccaatctgaagagcctggttgaccagtgtggctgtcttctctggcccctagtcaatctgagaccagtcactcctagcagaatgaaaagtttgcacatggctgcttctaacctcagattctccctctttttaacaccaggaaaggttttctttgaaaattcccctgcttctctgagtctgctgttatgaagggtgagatcacaccctgtagtcatgactttggtcctgaaacaattattcatcctgttctacttaagcttggtggcccgtgctcactgggtgatgagctctccccctaatccctctccccaccagttctctcatggctcactgccctgttggctttgtcaggtgcaattgcatcaggttaaggcaggggaggaggggtgagggctgggccccagcttgggaattaagaagttgagagaggccagagagagaaggaagcaaaaagatgaagacagatacagaaacactcctgttttcaaagtcttaggcataaggggcccttctcaataggttactatttataggaacatacacagagttgctgtacccagacatgtgagccccagtgatgagatttctggtccagtggaaacatctgaaagtcgttacttaaaatgttaccaagacagccacaggcaggctctgtatgtgccctcagtcaacaaaatcttccccaccctcctctaagactctaagttatgttggatccatgagaggagtcaccatgtcatcctcaaaatgccactgagaaactgtcatccaatgactgtcatggttttcccctctttatttcttctggaagagtggaagtagggggaggcagaaagtgtagtggcagaggataaggctgacagaccacagtgggtgactgaagtactaagacaatggggtggcacagaagaatgctgagcagccagtgttagaactgtgttttaggccgggcaccgtggctcacccctgtaatcccagcactttgggaggccgaggcaggcggatcacgaggtcaggagatcgagaccatcctggctaacaaggtgaaaccccatctctactaaaaataaaaattaaaaaaaaattagctggacgtggcagcaggcgcctgtagtcccagctactaagacaggagaatggcgtgaacccaggaggcggagcttgcagtgagctgagatcaggccactacactccagcctgggtgacagagtgagactccgtctcaaaaaaaaaaaaacaaaaaatactgtgttttagattaaaatgctccagcagccagagtgaggactggaccagacacagaccagggtgagagatctcaagatgggcctggggcatcagcagtgatgacggaggataggagatagatttctatggctgatatttattattttacatgtgtggctgcccattaatgtttttatttgtttgttgttttagagagagggtcttgctctgttgcccaggctgagtacagtggcatgatcacagctcactgcagcctcaaactcctgggctcaagtgatccccctgcaccagtcccccaagtagctgggaccacagacctgcaccaccacttctagcaaattttttaaattttttgtagagatgggggcctcactgtgttgcccaggcccctcttgaacaggagatcctcccacttcaccctcccaagtagctgagattacaggtccacaaagcccagcttttttttcattatctttttaacagccttttgcaatttgggggaaatagaacataatgagttccactggaaattttctgatgtagaaatcagaactcaagtgatttccagactcatttgctgctatgccatgagcacataaccagccttcatcaactagacactccagttgggaagtggtcaatttgaggaattggtctatttggagctcacgcacagttttgctggtgtaggaaacaaccaagtcaccagctttcagggcagcatgtttgccaagccaaattgccaacccagaagtgacattaatgctggtaacattgcaataaagtcagttttctggcatctagtattcagtggcagcttcagcaacagcaatcaaagtctcaacattaagctagagctgctacgtggtttcggatgttcttagaagcttggcctcaagccagtttctccgtctcctccatcaactatgggggctacttgacatattttgctaaattacttttcttcctagttttgtattctgtcatttgcaaccgagaaactggctgatacaattcttggttatttatgggtaatattaagaggatttagtgacctattagcccaactactagaacagtgactgacacatagcagacattcagtatacctcaaatacttgttgagaggcaggaaggcaggaaggcaggcaagaaggaaagggaagggaagggaagggaagggaagggaagggaagggaaggaaagggaagggaagggaagggaagggaagcaaagggaaggaaagggaagggagggaaggagggaatgagggaagggagggaggagggaagggacggagagagggaagggggaagaaaagaaggatgaagggaaggataaacagagtgtatgtaatatgagagatgaaggagtgtaggatgatatacagattagacaactttgtggatggtagtgctatcactgagacatgaaaggcagaagacagagcaggtttgagaaaatgatgagtcaggtttgggaccgctggattcaagtttcctccagtacatccaagtacagattttcagtagtttgctggatatttagatccagagttcaacaggaaactcagggcagtagatgacttgcgggtgacccagacagaggagtaagtgagttttgcaaatggaagaaatgccctagtgcaaagaagaaatgacaatgaatgaaattctgaaaagtaccagcatttaggagataacttgaggagttgctcacaaaagacactgaggaaaactgccagaagttcagctgagctttgtggacccacatgtcatcaaaggccagtggtgactggaccaggtgaaaacaagaaatctttctgcttctgtttccatttccacagtgcatgggccaaaacacttaccttcccggctccttgctgtgaatgatcatgaaaggcaggcctcttgaccaagctgcagacatttatgagcatctactgcgcgctaggcactgagcaaggcaatttacattgattgtcctttttaattctatcaattgcactatgagtgacttattatatttgtcccattattgctgaggttcaaaaaagtaaggtcactttccacttcccacagggctggctattagaatcattcagcaagagatcctgaacagggctggagggagaaggcttcaaaaagagcaaccagtttgcattacgggaaactgaggcacagagatgttactcgcctaacgtcacatggttagtgactggttctaatcccaggccagcctgccttaaggatccaatgatgataatgttgatgatgatgtgacagggatagtaacagtgatggtaacaacaacagtgactgctgctacgtttatggggtgcctataatatgccaaaattggtgcatttcatgcattgcctcacttaattctcatgacaacacaataaggtagggctatcataaacccctcttcagccatgagtgtaaaaggggctcaaattgtcactgtgagcaataataatcctactggggcttggggctggaggttggcatgcaggacaggctggaaacagactgccccacagcagatcctggcttctcagaccccgaggcagccccagggagcagacagcccagcccaacccaggcaagggagacattctgcccagacaaaccgcagaagcgtctggggcgctgctgtctcctgtcctctacaaacttgtagcagcttgcgtgtgcagatctctgggatgagatgatcaaggactggcccccctgtcccaagtgctcatgaggaaactgccctgtgtgccatagggctcatctctccaggcctgcccagacccaggaccttgaactgaaccatgcacaggtctataggttgaggaggtggatagaaaagggtccccagatagcagaccctggtgggaattttagcgccaccataagcctttgttctaagcttcctttcatctggcttccagaactaggacctgctggatggtttattgcctttccttttaagtcacattaaaaataacttttcagtaatcaccctaacacaaggtacttgactcgctggggatccccagtgcctagaaagatgcttggtatgtactagaaataacaaatatttattgagcacttactatgtgataggcaaggcaccatgaactttacattctttatctatcacctttaatgctcactacaaccctatgaaatatattctcttattatctccattttacagatgagaaaactgagactttgaaaggtgaagtgacttagctcaaggtcacataatgaaaaagcagcagagctaggatttgactgcagtctatgctcagacagtcccaccatgatactgtgttgtataaaataggtgaaagagtgtgtgtgtgtgtgtgtgggtgtgtttagaaaggcagcctaatttggtggagatatttagtagagacatttaggaaccttgggctccaagcttaattctgctatatgaaagctgtgttacctcgatgaaagaacttgacgtctctgagattcagtgtcctcatccttcttttcaaacctccagttgtggaagacaaactatggctctgaaataacaagcacaaatgcaatagaaatacaaagcatgagtgagtatacatagacacttgtgtggcccatgtgtgtctgtgtatgtggcagctccctgggcaggtctgtgcatttgtgtgtaaatgcttttacacgtgagcatgcgtagcagaatcatgtctgtttcctctcttgagagcccctggttatgcactgtgggtccggaaaaggtatccagacctcactcattatacccatttgcctgttgtacttagaaactttattttctaccgaagttatggctccctcccagctgttgaaagtctgggttatggcatgagtggaagatcaaggctgcttccactcccaaatgcatgctcagtccctcgctctgcccatttgtcaactcttggcccaaaactgtcctctcagagatttcccttaggctgagtaaggaagccagttatagccacctgggaaaaaggagcctcagacaatgtggaggggccaggggagaggatacctgctccaggtcttattttcctctctcaatacctaagcaaacgcgccgtgacaaaggaggggactttggcttttccacatagagtgagtgctacataaatataaattaaagacatcaacaaccatcaatagtcacttttataagacccattttacagataagagaactgaggttcaaaatgtttaagtaattgacacaaggtcacagggcacataagcagcaaagacaggatcctggagcagctccatcctacaccaaaacctgcgcttattccactgtgcccacgaaggtatcaaactggtgcacctggcaaggtcataggtgaggcagctgggatttcccaatctgccttaacacatagccttagccagggtgactgagcaagaaagcactgtctctgcctgaaattgtgccagggaaagggtgcagactcaagagaccagcttagcagttgtgtaaggggtatcatcctgcctgcacactgtttccttatctgcaaattggtctagcacgccacacctctcaggatcagtggagaccagaagagtgtggggagatcagcacatacaggtgtgtggaccagagatgaagacccatgaacatcaggcagtggggatagaaagaaggcagaggccaggtcctgaaggtctagtgaagccatctgtattagtttcctgaacttggcagcctaaaacaacaaacatttattatttctcagctttagaggccagaaatccaaaacgagtttcagtgggccaatatcaaggtgttggcagggctgtgctccctctggaggctctagaggagaatctgttccttgccttttccagcttctgggggctgccagcttcccttgatctcagttgcattgttccagtatctgcccccgtgatcactttgcttctcagtctgtgtgtggtaaaacctccttctgtctccctcttataaagagacatgtgatggtatttagggcacacctgtataagccaggataatctacccaccttaaaatcctcaacttaatcacatctgcaaacagtctttttccaaaagaaaaaataaaggaatatttacagggattaggaacaattatctttcgggggcattttcagcctactacaccatctaaataagctgatactacatcttggtggcaccaaggagccattggaaggtctctggtggcagagtgccatgatgagatctatttcctgaaataaatgtggactctctcatggcctgtggcaaatccactccctgctcgaggtttctgaaaagtcccagaggctttcactattttgtcactcctagctccctttctttccctcttacctatgatctcctgcacttctgctcaaatgcagaattaaaatattcttccttgatctttaccccctccccccaaaaaaattcactcacacaagacatttttgtgtgtcgatgactttactaaaggtttgtaatgtcagactgagttgacatcatagaatgcaaacaattttaaattaagcattaaatatctcattttgatgcatccttgacccaccctggctaccttctttctagactttccccttctaccatgttcccagactgcttattttcattctttttttattattttccttttctctgctctaccccatccggaaattcctgcaatttctcagactgagcagttaagatatgtcttaccctctccaggtgataaatgttaatttctggcctctaaagctgagagaggtgttaatttcctaagcaagggtaacttcctccccaagaggatccctaatactgcagttgaaatcagaattttttcatcctattgcacttatacatagaagtatattatatgttaaatacatttaaagggacatcgcacatgtaaatacccacacactctcatacacacacatgccccaaagatcacagctaagtcccaacttgaagtaagcatgttcgaatgtcatcgccatgacccacccacccatctgttttgagctgtggttggcagcaaataattagcattcaccaggatggccaagcccagcttccactgtggatcccaacagcctgcctcacagcaagagactccgctttggtgtaattacctattccttgcacaccagttgccctggtgtgatgtcagcccctccacattgtttattttaattaaaacagaaattgcaggtcttaggtgcttgtaattacagcccatgaactaaattgactgaggcccctaattaacctgaaacacgtctacctggctggaggtgtgagtttggacttgactagttcagggcactgcatcggcaccaaaaacagagcaaggaaaggtctattagggattcagatagggcatttgccctccaaaaactgctacacacagcctgtacccctcagaccacattgtgggttcaatttcaattccaaatgtacctaattagcccaggacacactcagcaaaagtgtagtgatagcatctaaaaatcaactaatgtaatcatcaatagaatagaaagcaaaaacaaaggagtaaaaaaataaaaataaaaaatcacatgatcattccaatagatgcagaaaaaaacttttgacaaaatccaacactctttttttaataaaaacactcaacaaactagggatagaagagaacttcctcaacctgataaagagcatctatgagaaacccatagctacgtcatactcagtggtgagaaactttctccctaaggagatgctttctccctaagatcaggaacatgacaaggatgtctgcccttaacacttcaattcagcattgttctggaggttctgtcgcaggcaattgaaaaagaaaaagaaatacagacattcagcttggaaagaaagaagtaaaactatctctatttttatgtgacatgatctcatatatataaaatccgaaggaatccactaaaaaatagaactaataaatgaattcaacaaggttgcaggatacaagatcaatctacaaaaatcaactgtatttctatacacttgcaatgagaaatctaaaaataaagttaagaaaataatttaatatgcaatggttggtgggactgtaaactagttcaaccattgtggaagtcagtgtggcaattcctcagggatctagaactggaaataccatttgacccagccatcccattactgggtatatacccaaaggactataaatcatgctgctataaagacacatgcacacttatgtttattgtggcactattcacaaaagcaaagacttggaatcaacccaaatgtccaacaatgatagactggattaagcaaatgtggcacatatacaccatggaatactatgcagccataaaaaatgatgagttcatgtcctttgtagggacatggatgaaattggaaatcatcattctcagtaaactatagcaagaacagaaaaccaaacaccacatattctcactcatagtgggaattgaacaatgagaacacatggacacaggaaggggaacatcacactctggggactgttgtggggttgggggagggttgtggggtggggggagggggagggatagcattaggaggtatacctaatgctaaatgacgagttaatgggtgcagcacaccaacatggcacatgtatacatatgtaactaacctgcacattgtgcacatgtaccctaaaacttaaagtataataataataaaatttaaaaaaaacaaagtagtaaaatagaaagtaatttaacaaaaaatataaaacttaactctgaaaacttcaaaacgttgttgaaagaaatttaaaaagacctataaaactctaaaaacattcgaggttcatggattgggaaacttaatattgttaagatggcaatattcctcaaattgatctacaaatttaacacaatccctatcagaatcccagcttgcttctttgtagaaattgaaactgattataaaattcatatgtaatttcaaaggtctcagaatagtcaaaatcatcttgaagaaaacaaagttttcccaaatgcccatcaattatagactggataaagaaaatgtggtacatatacaccatggaatactacattgccataaaaaggaatgagatcatgtcctttgcagggatgtagatgaagctggaagccatcatcctcagcaaactaacacaggaacagaaaaccaaacaccgcatgttctcactcataaatgggagttgaacaatgagaacacatggacacaaggaggggaacagcacacaccagggcctattagggggtgggagataaggggagggaacttagaggatgggtcaataggtgcaacaaaccaccatggcacacgtatacctacgtaacaaacctccacgttctgcacacgtatcccagaacttaaagtaaaatttaaaacaaaactgcatgttctgcacatgtaccccagaacttaaagtataataaaaaataaaatttaagaaaaagaaaagaaacaaaaatgaaaaggcaacccacagaatgaaagaagatatattcaaatgctgtctctgatgagagacttgttctagaacatgtaaagagctcttaaaactgggtaataaaaagacaaataacccaatttaaagataggcaaaggatttggattggcctttatccaaagaagatatacaaatagccaataaacacataaaaagatgctcaaccattaagcagggaaatgcaaatcaaaaccacaatgggataccacttcacgacaacaaaattgcctagataggattgcctagatagcaacaaaatcagaaagaacaaaacatcagtgttggagctatgcagaaattgcaactctcatacactgctgatggaatataaaatggtgaaaccgctttgggaaacagcctgaaagttcctcaaaaagttcaacacagagttaccatatgacccagcaatttcactcacagtagataaccaagaaaaatgaatacatacgtcacataaaaaactttcacacaagtgtttatgtaattactcataataataaattatattatgaattaattagtcaaaaagtagaaataacccaaatattaatataaatcaacttattatagacaatatatggtatatccatacactggaataaaattcagccacaatgaatgaaatgttgatatatcctaccacatagatgaactttgaaaaagttaaagtacatgaaagaagacagtcacaaaatatcacgtattatataattatacttaaatgtaatggccagaataggtaaatctatagagataggaagtagattagtgcttgcttagggctggggaagatagcggggtaggggagtgattgataaaggatgcagagtttctttgtgaagtgaggaatatattctaaaattgactgtaatgatagctgaacatatctgtaactatactaaaaaccattgaattgtactctttaaatgaatgaattttatgatatgtaaattatatctcaatgaagctgctttactaagtgtactgggtaccaagtacctcccaggcaccatacaggtgctgatataaaagccatgtcaaatacataaactgagtgtcttctttgttttttaaatgattcttcctcaatttttagaaaattaagaaaaactataaggaagaaaagagaaatcatctataatcatacctccagtgacagccattatttatatttttcatgcattttctctgtttcttccattcaaaatccttttaatgtattggatgccattttgaacatcttaaaatatatttatattaacaaacccttacatgcttaccaagcaatttaaggaataaaacaacatcaatagaagaaaacaccatctacatgcataattatcttgaggaaataatcagaggttatccaagatgtataggatgctcaccccagcaccacccttaacggtaaaacaaggaaaacactggctgggtgcagtggctcacacctgtaaatcccagcactctgggaggccaatggggggtggattacctgaagtcaggagtttgagaccagcctgaccaacatggtgaaaccccatctctactaaaaatacaaacattagccaggtgtggtggcaggtgcctgtaatcccagctacttgggaggctgaggtgggagaatcgcttgaacccagcaggtggagattgcagtgagccgagatcaccccactgcactccagcctgggtgagagagcgagacttcatctccaagggaaacacaaacttaacaaaactatctcagcgaaggtttttttttttttcatctttgtgaatgtaaaaaaaaaaaagtatctttcatttttaatgtaaagtttttgataataatgagatatttttacaaatgtattatcttttgatgcctcagcaaattatatgtgcaagtcttatgggcactttttctctggttttcttttttatatggtgattttttaaaatctctgcacgtattaaggacagtaaccattctgccgtatatattgtaagtacttttccaatttggacatttttcttttactgttgcttataatatttttaaagatatggatttttttttcagtggccaaatatattattcttatccttaagatctcttctattgctctgaggcttaaaatatctttcatcatctgaaactcaattaaatatttattatatattattctagtatttcatactggcaatcttaacttttcactatgctgtgttaagtaaaatttgtgtatatcataactgcccaaagcaataactgcctgtattttaaaaagtaactctttaatccatttataatttaatttaggagataatgtgaggtaaggttctcattttattttattccaacactcattaaaaaattcacccctttccaaataattaacatttcttttatcttctattaagcttataggtattctagcatgcaattcaagactatcccttctatttcatgacatcatattttaattgttgtataatgccatattgtttcaactacagtagtatatatgtcaaatacataagaatgacatttttacttctgttgcaggaggcaatgcttgttttgtctaatgaaattcagaatcactttcaaaatcaaaattccaaaccatgttaaatgtatgaatgaatgagggactaattaatatctttgcaatatacaatctttccaactagatatatagttgtctttctattcattctttttttatatttctaagttgaagtttcagatctgattttggtttctttccaatatgttataataaagtttcaggtatacaaaaaagttgaaagaattttatagtgagcacttacacagattatctcattgacaccttaattcctttatctcaatccatcttgagatttttatacactttaaattatgtatatatatacacatgtatgtgtatatgtgtgtgtgtgtgtatatatatatatcagtacatatcctcttaaatatttcagaatacatatcattaactgcagttcagtatttgtttacaggtttttgtggtaaaatttacacacaatgaaagacaaaaatcttaactatatattggctgagttttgacaaatgcttacatctatgtacccaaacctccatcaagatgtaaacattgcatcattccaggaaattccctcatgtccctttttcatcaataaccatttcttcccccagagtaaatcactattctgtttttctccaccatgaattagttttgcctattttagaacaacatattatggaataccgttcccatgtgtactcttgtagatgacttctttcacatgacaaaaccttttgagattcctctgtgctgttgcatgttcaataatttgttcctttctattcctaagtagtattccattgcatgaatatactgtaatgtgtttattcattctcctattgatagacacctgggctgtttccagtttataattattattattatatactaataaggtcttgctaggaacatacttgtacaaacctttttgtaggcatatattttcagttttcttggttaattacctgggattcaaatttctgggtcacagggtagatatgtgttcagatttatgaaaaattatgagacattttgccaaacgcccactaacaatgtatgacagttccagttgctccacattcttgacaattgggattgtttccatctttcattttagaacttctgaagggtgaataaggatgtcacattgtggtttgaattttcctgataagtaatgatattgagtatttttatatctggtcattggccaggtgtatatattttgtgaaatgcctgtccagttaatttgctcatttttactcctttattattaaattgcaggagttctttatacatcctggataccagtctattgtcagataacatctgttttacttataattttatccagtttgtagattgcctacctaacagtgtctatctatgagcagaagttttcttaataacgtctatttatgagcagaagtttcaagctttgatgaagtctaatttatcagtttttctgagtcttgtcaaagaaaacttagtctatccctaagtcataaagatactatcctatatttctattgaaaactgtgtggtttgtatattgtataaagtggcagttaaagtcctttttctcacgagaataactggctattgcagcatccttagttagaagacttttctttctgtattgaattgctttgatgattctatcaaaaattagttggccagtggagtgtgtttatgagctttctgttctgttccactaatcatttgttgatggttatgccagtaccacattgtcttaattgctttagctttaaaatgagtcttgaaatcagatagtataagttgactaactgttcttctttatcaagattgttttatcaaagtattctatgtgcttgcatttatatataaatagtagagtcatttttttcagtttctgcaaaagtctttctattgtgattatgttgaatctattggtcggttgggagaggattaacatcttgacaacattatatcttcgtatccataaccacccattgatttgggtcttctttatttactctcagcaatgttttatagttttcagtgtagaggtcttgtacatatactgttaaatctaatccccagtattttttgtttttgataatctgtaaagggtttcttaaaattttacttcccaaacatttgttgctagtatataaataataaaattgatttgtgtatgtttaccttgaatcttacgagctctctaaattcacggattacttctagtagttgtttcatagatttattaagattttatatgtaaacaatcatgacaccagcaaataagtacaattttacctcttcctatctgtatgcattttttttatttttggtttttctccttttgcaatggctgcaatcgcagtacaatgttaaatagaatggtgagagagggcatctttgccttgtttccaatcttagtgagaaagtgttcaatatttcaccaataagtatgatgtttgatgtatctttttaataaataatctttatcgattgagaagtttctcttttattactagatggttttattgctagattaatgactagattgtttttatcaatgggatgttcattttctgtcaagtctcttttctccttgatgcatgtttcttcctagttctgttaatgcagtggattatactgttggatttttaagtgttaaatgaactttatatttctgagataattctgacataataaaaaagtcagaatgtgtcattcttttcatatacactactggattgggtttgctaatattttgttaagggtttttgaggctctgttcatccaggactttttgtcagtaattctttctatcttcctttaattttttggaacaagaggaaatatctgtcagatttgggcattatagtttcataaatgagggtcatgaaatgaattagggagtgtttcttcctcctctcttttctgaaaagagtttgtaaacgatgttatttcttcttaaatattgagagaattcacttgtgaaaatattgagacctagaattttctttgagggaagatgtttattaacttctttgactccacatttacttggagaatttggtatgtgtttatttgtgtgttggggaagggggttattttaaaccctattattcttttttattctttttttttttcagctttttatctaatggagctctgctctactgaggtggaatcgcttccaaattttcttgccttattctttaacattcaaaatcagcagaacatatgaaagtctacagtgtccagcaggccctgctgctcagtctgtccttgtctctgtcctcatcacacaactttacttatagtatctattcctcccaggatccatgtattaaggtcacaactttctaccctgtcattttacaaaacatatgatcttcaacaaatatattgaggatggcaagatttggctgccttaaaaagcaactcacagacttgagagatggccatccaattttttaattgctgcagatgctatgtctctgagccaatgcaaagagagggagagggaaagagcgtctccacttttacgatggcagggctgcactgtttctgtgtcttcattagagaggttaattggaaatcaagagaggctgtgtcacgggcagcaatagctagccagatgccattttaaactggaatttatccagctgatttctttgaaaatctaccatgctttgctcaatagacacactgctggctggcaccaaggaaatgactggtacgtaagcacacattcagcatttagtagttcatttttcccttccttctgctccttcagctgatcatgtcctcaattatactcagaaatgagggattcccttcatgaatcagtaagggttgagagcaatggctaagagttccgactgagtcttcctcaacttatctgcattcctggttactgcaaagtttttataagatcctggaaataccaggctatttgaacccattcagttatctctggctcatgcacctcatccatcagcaaattaaaacttggatgtgagatgtcagtgaaggaaagagaagcatggtcccttaactgctacaaataatatgcaagtgagctagcagaggtatgtcataaaagggatgaggggcaaaaaggatctccctctaggcctaggaacattctgaatttgatgctttcctgtggattataatcccacaagacacaatgccaaatgccataacccaaatgttgaaatccctgacatccacatttctaaagtctaaaattcctaaggtctaaaatcccaaaaatcacaaacacaggatagttgcatcaggttagggagaacgattactctgttagtgtctttgtttggaagttaagtatggtttaaggagatgcatatgggtgccaagttgacaagaggtggacttgtgaatttaattttaggtgtcaccttgactagattaaggagtccctagaaacctgataaagcattattttgggagtgtctgtgaggttgtttccagatgagatgagtgtgagtctgagtgaactccgtagggaagatctgccctcaaccttgtcaggcaccctccaatcagccagggcacagaaggcgaatcaatttctctctgagagctggggcagactctcttctgctgctttggacatcagtactccaggcttgctggcctttggacttcagttgttatacctacagccccgcaggtagtgaagctttcggttcttgactgatagaccataagcttctctggttctcaacataaaaacattgaaatttcctctgtagtgtaagagatgttatttttgttcgttttcgtttttgaaagctaaaatttattgagatctcagctctttgcaagactgcatatgcagtggtgacccattgagggttttggtcagtctcatcaaaatacaggttgtctgacacgatatttcaagtgaccacagttataaagccgggtgcagccaattaccaaccatgatgatatgcattcatacatttcgctttttgacctatttctttatgaatacatttgtctgatcataactgttacactcctgtaaatgtttttagtatacctgggtgtttatgcttataaaaaatgtatgttattattccctatttcattgtgtaaactggcctaggaagtgttctgtcatgtttttatatgtttctcaggaaaacccattttaacatgtaaataaatgttttttaaagaatattttattattttttccagaatcatattttcaggattttgatcttttgggatttcaacatttgcaattacggcattaagattgtatcttccaggattaggatcagcttctgaatacttacagtctaatgccaaggaagaaagctaatggccaaaatatttaaatagcttagtcttttgatgaacaactaactcagctatttgagttgctaatgtcaaagcaaagacaaaattcccaggaataatgttccagagcaaacttgctcaatttttaaatgcgttttaacaatgatcatgtattgacagaatagaacaaggattttttaaaattgatctgcagaaaaaaatggcttatctatacctgtcatgtctaacatggtaacaactagccacatggggctattaacccatgtgaaatgtggctaatccaaattaatatgtgctgtaagtatataacacacaccagatacaagtacaaagacaaagacatagtatgaaaaaaggaacgtattttactaataatgtctctgagaagttgcatgttaaaataatcatattttagatttattggattaaagaaaatgtgttattaaaattaattttacctctgtttttacttgtttaatgtggttcctagaaaattttaaattacatatgtggctcatagtagatttctattagacagctctaaacaattaaaataatggcatactggaaaaagttcttgtgcatgtatattagttcaccagggctgccatagcaaagtaccacagattgacataaataatagaaatgtatttctcacagttctgggggctggagtctgaggtcacggtgttggcagggttggtttcttctgaggcttctctccttggcttgcagatggccacctcctccctgtgccttcacatggtcttcagcacctgtctgcatctgaatttcccattcctataaggaggacatcagtcaggggaggagccaagatggctgaataggaacagctccggtctacagctcccagcgtgagcgacgcagaagacgggtgatttctgcatttccatctgaggtaccgggttcatctcactagggagtgccagacagtgggcgcaggtcagtgggtgcgcgcaccgtgcgcgagccgaagcagggtgaggcattgcctcactcgggaagcgcaaggggtcagggagttccctttcctagtcaaagaaaggggtgacggacggcacctggaaaatcgggtcactcccacccgaatactgcgcttttccgacgggcttaaaaaacggcgcgccacgagattatatcccacacctggctcggagggttctacgcccacggagtctcactgattgctagcacagcagtctgagatcaaactgcaaagcggcagcgaggctgggggaggggcgcccgccattgcccaggcttgcttaggtaagcgaagcagccaggaagctcgaactgggtggagcccaccacaactcaaggaggcctgcctgcctctgtaggctccacctctgggggcagggcacagacaaacaaaaagacagcagtaacctctgcagacttaaatgtccctgtctgacagctttgaagagagcagtggttctcccagtacgcagctggagagcagctggagatctgagaacgggcagactgcctcctcaaatgagtccctgacccctgacccccgagcagcctaactgggaggcacccccctgcaggggcacactgacacctcacacggcagggtactccaacacacctgcagctgagggtcctgtctgttagaaggaaaactaacaaacagaaaggacatccacaccaaaaacccatctgtacatcaccatcatcaaagaccaaaagtagataaaaccacaaagatggggaaaaaacagaacagaaaaactggaaactctaaaaagcagagcgcctctcctcctccaaaggaacgcagttcctcaccagcaatggaacaaagctggacggagaacgactttgacgagctgagagaaggcttcagacgatcaaattactctgagctacgggaggacattcaaaccaaaggcaaagaagttgaaaactttgaaaaaaatttagaagaatgtataactagaataaccaatacagagaagtgcttaaaggagctgatggagctgaaaaccaaggctcgagaactacgtgaagaatgcagaagcctcaggagccgctgcgatcaactggaagaaagggtatcagcgatggaagatgaaatgaatgaaatgaagcaagaagggaagtttagagaaaaaagaataaaaagaaatgagcaaagcctccaagaaatatgggactatgtgaaaagaccaaatctacgtctgattggtgtacctgaaagtgacggggagaatggaaccaagttggaaaacactctgcaggatattatccaggagaacttccccaatctagcaaggcaggccaacgttaagattcaggaaatacagagaactccacaaagatactcctcgagaagagcaactccaagacacataattgtcagattcaccaaagttgaaatgaaggaaaaaatgttaagggcagccagagagaaaggtcgggttaccctcaaagggaagcccatcagactaacagcggatctctcggcagaaaccctacaagccagaagagagtgggggccaatattcaacattcttaaagaaaagaattttcaacccagaaattcatatccagccaaactaagcttcataagtgaaggagaaataaaatactttacagacaagcaaatgctgagagattttgtcaccaccaggcctgccctaaaagagctcctgaaggaagtgctaaacatggaaaggaacaactggtaccagctgctgcaaaatcatgccaaaatgtaaagaccatcgagactaggaagaaactgcatcaactaacgagcaaaataaccagctaacatcataatgacaggatcaaattcacacataacaatattaactttaaatgtaaatggactaaatgctccaattaaaagacacagactggcaaattggataaagagtcaagatccatcagtgtgctgtattcaggaaacccatctcatgtgcagagacacacataggctcaaaataaaaggatggaggaagatctaccaagcaaatggaaaacaaaaaaaggcaggggttgcaatcctagtctctgataaaacagactttaaaccaacaaagatcaaaagagacaaagaaggcaattacataatggtaaagggatcaattcaacaagaagagctaactatcctaaatatatatacacccaatacaggagcacccagattcataaagcaagtcctgagtgacctacaaagacacttagactcccacacattaataataggagactttaacaccccactgtcaacattagacagatcaacaagacagaaagtcaacaaggatacccaggaattgaactcagctctgcaccaagcggacctaatagacatctacagaactctccaccccaaatcaacagaatatacatttttttcagcaccacaccacacctattccaaaattgaccacatacttggaagtaaagctctcctcagcaaatgtaaaagaacagaaattataacaaactatctcccagaccccagtgcaatcaaactagaactcaagattcagaatctcactcaaaaccgctcaactacatggaaactgaacaacctgctcctgaatgactactgggtacataacgaaatgaaggcagaaataaagatgttcttcgaaaccaacgagaacaaagacacaacataccagaatctctgggacgcattcaaagcagtgtgtacagggaaatttatagcactaaatgcccacaagagaaagcaggaaagatccaaaattgacaccctaacatcacaattaaaagaactagaaaagcaagagcaaacacattcaaaagctagcagaaggcaagaaataactaaaatcagagcagaactgaaggaaatagagacacaaaaaacccttcaaaaaattaatgaatccaggagctggttttttgaaaggatcaacaaaatagatagaccactagcaagactaataaagaaaaaaagagagaagaatcaaatagacacaataaaaaatgataaaggggatatcaccactgatcccacacaaatacaaactaccatcagagaatactacaaacacctctacgcaaataaactagaaaatctagaagaaatggataaattcctggacacatacactctcccaagactaaaccaggaagaagttgaatctctgaatagaccaataacaggatctgaaattgtggcaataatcaatagcttaccaaccaaaaagagtccaggaccagatggattcacagccgaattctaccagaggtacaaggaggaactggtaccatttcttctgaaactattccaatcaatagaaaaagagggaatcctccctaactcattttatgaggccagcatcattctgataccaaagcctggcagagacacaaccaaaaaagagaattttagaccaatatccttgatgaacattgatgcaaaaatcctcaataaaatactggcaaaacgaatccagcagcacatcaaaaagcttatacaccatgatcaagtgggcttcatccctgggatgcaagactggttcaatatacgcaaatcaataaatgtaatccagcatataaacagagccaaagacaaaaaccacatgattatctcaatagatgcagaaaaggcctttgacaaaattcaacaacccttcatgctaaaaactctcaataaatgaggtattgatgggatgtatttcaaaataataagagctatctatgacaaacccacagccaatatcatactgaatgggcaaaaactggaagcattccctttgaaaactggcacaagacagggatgccctctctcaccactcctattcaacatagtgttggaagttctggccagggcaattaggcaggagaaggaaataaagcgtattcaattaggaaaagaggaagtcaaattgtccctgtttgcagacgacatgattgtatatctagaaaaccccattgtctcagcccaaaatctccttaagctgataagcaacttcagcaaagcctcaggatacaaaaccaatgtacaaaaatcacaagcattcttatacaccaacaacagacaaacagagagccaaatcatgagtgaactcccattcacaattgcttcaaagaataaaatacctaggaatccaacttacaagggatgtgaaggacctcttcaaggagaactacaaaccactgctcaatgaaatagaagaggatacaaacaaatggaagaacattccatgctcatgggtaggaagaatcaatatcgtgaaaatggccatactgcccaaggtaatttacagattcaatgccatccccatcgagctaccaatgcctttcttcacagatttggaaaaaactactttaaagttcatatggaaccaaaaaagagcccgcatcgccaagtcaatcctaagccaaaagaacaaagctggaggcatcacactacctgacttcaaactatactacaaggctacagtaaccaaaacagcatggtactggtaccaaaacagagatatagatcaatggaacagaacagagccctcagaaataacgccgcatatctacaactatctgatctttgacaaacctgagaaaaacaagcaatggggaaaggattacctatttaataaatggtgctgggaaaactggctagccatatgtagaaagctgaaactggatcccttccttacaccttatacaaaaatcaattcaagatggattaaagacttaaacgttagacctaaaaccataaaaaccctagaagaaaacctaggcaataccattcaggacataggcatgggcaaggacttcatgtctaaaacaccaaaagcaatggcaacataagacaaaattgacaaatgggatctaattaaactaaagagcttctgtacagcaaaagaaactaccatcagagtgaacaggcaacctacaaaatgggagaaaatttttgccacctactcatctgacaaagggctaatatccagaatctacaatgaactcaaacaaatttacaagaaaaaaacaaccccatcaaaaagtgggcgaaggacatgaacagacacttctcaaaagaagatatttatgcagccaaaaaacacatgaaaaaatgctcaccatcactggccatcagagaaatgcaaatcaaaaccacaatgagataccatctcacaccagttagaatggcaatcattaaaaagtcaggaaacaacaggtgctggagaggatgtggagaaataggaacacttttacactgttggtgggactgtaaactagttcaaccattgtggaagtcagtgtggcgattcctcagggatctagaactagaaataccatttgacccagccatcccattactgggtatatacccaaaggactataaatcatgctgctataaagacacatgcacacgtatgtttattgcggcactattcacaatagcaaagacttggaaccaacccaaatgtccaacaatgatagactggattaagaaaatgtggcacatatacaccatggaatactatgcagccataaaaaatgatgagttcatgtcctttgtagggacatggatgaaattggaaatcatcattctcagtaaactattgcaagaacaaaaaaccaaacaccgcatattctcactcataggtgggaattgaacaatgagatcacatggacacaggaaggggaacatcacactctggggactgttgtggggtggggggaggggggagggatagcattgggagatatacctaatgctagatgacgagttagtgggtgcagcgcaccagcgtggcgtatgtatacatatgtaactaacctgcacaatgtgcacatgtaccctaaaacttaaagtataataataaaagaaaaaaaaaaaaagaaggacatcagtcatattggatgaaggcccacaggaaagaaaggcctcatttaatcttaattacctctttaaaaatcctatctccaaaagcgattacgttctgaggtactaggggtttagggttgcaagaacaggaatttggggggatacaagtcagcccataacagcatgacattgtcctgggtttggaacttgtgttcagtatttactagctatatgatcctcagaaagaaatgtcccttctctttacccaaaatttattaccattaaaacagggataatttattatatttcatgatatgtatgtgggtatatgtatataatattttatcttaagcatttcgtcaagttattaggtatctcactataatataaataagaagtttgagggctgcatttttccacttctgccactataccaacatgtatttaaccaatccactcttagagtatatcaaattgtttctaactttctactaactttctactctaactttctactcttacttgtagtaagtcacaagtcagttgagtcagtgtcagcaaagtcatgcttcctccagaggtttagtgtaggatcctgcctaggctcttccagcttctggtggctcctgacattccttggctggtagcagtgtcactccaatgcctgcctctgtcttcacatggtcttcttccttgggtctctttgcatcttctccttttctgtctcttagaaggacacctgtgattggatttagggcccaccctaatccaggatgatctcacctcaactgtattagtctattgttacgctgctgataaagacatacctgagactgagactgggtgatttataaagaaaaagagatttaatgggctcacagttccatgtggctgagaaggcctcacaatcatggcagaagacaaaaggcatgtcttacaaaatggcaggcaagagacagaatgagcttgtgcaggggaatttctcttcataataccatcagatctcatgaggattattcactaccatgagaatagcaaggaaacgcatgtccacatgattcaattgcctcccacacacgtgggaattgtaggagctacaattcaaaatgagatttgggtggggacacagccaaaccataacagtgctataatgaataagcttgaatgtatctttatatcattcatatctctgatatttccttagcaataaattctgagaagcagaattaactggtcaagggatatgtatcttttaagattcttttacatctgttgagaaattcaggaggtagactcccaacattaggaataaaatttcatttttccccataccatggcaagaactagggattatcttttttttaatatatttgtctatttgatgggtgaaaatgatatctttttacttaatttttatttttttcaccatttcaacaattatttaaattatttcaaaaaaaaaaagtattttaaaacaaggagagccttctgccctgctgactggatatttgaaatgttcacagagccctcgggagttttggttcttcattcaaactttcaattccatagagtttctctatcacatctcaactgacttttgtcatgctctccatatatgtagttttttaagattgccaactctatattagttgcctacagcttccacaacaacttaccccaaagttggtggcttaaaacaacagaattttattctctcataattctggaggccagcagtccaaaatcaaggtgccagcaaagttatgcttcctccaaaggttctagtgtaggatcctgccttggctcttccaacttctgatggctcctaacattccttggctggtggcagcatcatcccaatgtctgcctctgtctttacatgaccttcttccttgggtctctttgcatcttctccttttctgtcccttagaaggacacttgtcattggatttagggcccaccctaatccaggatgatctcacctcaagctccttaccttaattatagctgcaaacatctcatttccaaataaggtcacattcacaggttccaggggctaggactggacatatcccttagggaacagttttcagtccattatgcctccagagcccggctcctttgaagttccccatggagtcagttcacttccattccattagctgaatggtgagtgctactgcccccactatttggtttctcttgacacatgagaaagcaaatagtaatggctacaactaaataaaggaattgtttgtcttgtttctataatgtcatgtgaagagtttcacttttttttcatatacaatgaacatttgttgcaatgcataggacagtctactgacttagggtgagcaggggggcagagaggagcaggtgtcacatgttgaacacacaatgcccccatcaaaaacctccgttaaaaaactcagattctatgagggaaagaatgacaaaaataaaacgatttcaatataaactgaacattgatgagaaatataagccaaacatcctagggcatctaagaaaggagtgtgctattctgcctgagaaaagccaggagggaggagacactggacgtggacaaggagggatgatcattgatccatccagtggctcaggagggaagggcattccaggcagagggaacagtgtgttctaggcatagactcagaagtgtgcatgggaagtttattgaggaggtgggatgtccaacatacccagagtgcaaagcagcagtagggccatacgcagagtatcccaattagaaagtcttattgaaagaaaataagataaatttgtgaataacacaaaatgaggtacagttccgagtcccccaccaaaatgccgatctctccctcagtaaaggccagacataaaagggtactgcatgattccatttaagtgacgtttctagaacaatccaaatctatagtgattaaaaaaaaaaaaaaaagcaagttagtgcttgtctggggcaaagtgtgcagggaggttgcgtgtaaagagacaggaaggagtggtccgggtgacagaaatgttctatgctttgattgcagtgatggttacccaagtatatacatttgtcaaaactcacaaacagtccccttaggtgtgtggatttcattgtatatttatacctcaataaagatgatttttaaaaatgtaggagcaaaagggaatattcacttagaatgagaaaagaaattacaactaattataaattttgtcaataaaaagctgaatagtaccagaaacatctcagccattcagaaaaatagccattttgtgcattaatgaactgccgacctactttgataacattgtttttcctacttgttttggcttcattctctttgtctcttcccatgtcagtagtagtataacaagttttataatattaatggttgatcagtttgacttttattactgataatttagaaaatgtctctccacttcctaactctttgttcatatcctttgtattttttaaggattgtcacaaagtttggcaaaacctccatgaatttttttcgtatttgagctctggaacttgtaaggattgtccacagactagcttccagctctgtacatttcaaacttggtttctccgccatactttgggcaccacagaacacgttcacgtcgtgaaacagcctctggccccaaaccttcacttggcaacattcacacatcacatgtgagtcggcacagtaggtggtaccagtgtccttggaagcagatttcgacactgggatgattagcaattacttacccgtatatggaagcgactgcaaatcacacagctataagcccaaactaagtgtatccccaactcagtatcttcttagccagattcccaaagtccttgggaccgctctaacagtacagaagagacagaggaatggtacaaatatcagagaagaagagagagtggccttaacctatatcagtttaaatatcttattttcacaaatttggcagaaccacatggccatgggaatacattgctaggactgctagcaaggactctaaagctgaaaaacctcaggggctgctcagtgaggctgcctcagggcagtggctgccgtgggtagttttgggaaagtggtcgggaccagatttggagagctttcagtcaggtgctgaaatacagcctttaacctccaggcagaggggcttttcctttaacgaagagaacagaatcactttgtgttggtgggggaactctggcagccatggaaagggttgcttcagggtttactgtttgtttgttttagtttcttcttttaactcacagcatttcttatgcaacccccctcaaaataaaaataccttttctatttaagtgtctttaaattaagaaaactgtattaaatacattaaagataattttgaaaaaagcccagaactcccccctaccgcggccaaccaatttcaccaagctaaacttgtttaagtcacttaattatctaagtgaacaaagtggttcagaacatacactgcaaagtaaaattcctcacttcaaaatttggcaccaccgcttcctaactctgtgactctaggcaaattatctaagctctgcaacctcagtttcctcatctgtaaaacagaaaaaacaatagaagctaagtgtagagtcactgtgcagatgaaatgagctgattcactgggagcacagggcaccatttctgactcaatcaatgttagcagtgatgaatatttctgtctaccccttccccaggcagatatgttttattgagtctccacctctgcaggctctttttcatgattctttatcattatgccaaccattaaaatattcagggccaagcgaaacatttcaactaaaaacagctagttgaatgcgttgtgtggcccgtttcctgagagcacttgaggggagtcgtagggtgtcggagaaattagtcactgagaagggacacagaaagagggaagccaagacaaactgtgttagtcaggactctttgggtttcaatagaaaaaagcccaactcaaacatatttaagaataaaaaggcaagattggcagagcatggaggctcacgactgcaatcccgcactttgggaggccaaggcaggcagatcccttgaggtcaggagattgagaccagcctgcccaacatagctaaaccctgtttctactaaaaacacaaaaattagctaggcatggtggagggcgcctgtagtcccagctactcgggaggctgaggcaggagaattgcttgaatcccagaggcagaggttgcagtgagctgagatcgcacgactgcactccagcctgggccacagaatgagactctgtttcaaaaaaaatttttttaaagacagtattgtcccctacgacagaagggaaatggggtaatggtactgcatgcttatctggatcaaggagctcaaataatattgtcaggcatctccactttctctcagctttgtgtccctctgtacatttcctcattttctcctctagctatcgtgatgcagagggcagtgggcatgtccccagacaaccccaggctgacatcattgctgtttagcatcaaccaagggaagagctcgtcagcttgcctcatgtggccacagatggtaggatattgtccttggcaacctcaccagaaccctaagaagggaagggtgaggtgatattcccaagagaaagggtgaagggatgcaaaacagacagagagatgccacttgacaagggttctcatggccaaggtcagccattgcatcttcaatcacaatttccatttcaagactcatttcccacccacagggtgtgggcttcttggaggcctcaaatggtgggagtctgtcacccacatggactctgcagcaagccgccacctgcttcttcataagaggcaaactcgctcagaggcctgggctgcggctgtgggcgcccagtcaggcactgggcattcttgggcctgggcagttgctgagtcaaagggccgagggccaaggcacgggctgccctatcctgctcccctcagatgggtggtactgaatgttctccaggcgatgcagggctgctgtgctactttaattggagacggtgatggtgaaaccttcaggggaaattcaggtgccaaatgcctctcctagaggcgcattaaaagtgtctagtagttgaccaacccaaatagcaggcatctctggggaatttcccagcaggggcctcgccctatcacctcctcccacctcccagcacaggagaaagaatcctgccatccagacacacctggctctgcctccgccccttccaacctgcagattcttaagcaattttcttcacctctctaggcctcaatttccttattcataaaataggaattatactattttgtctggaataataagataatggccatagatctatttgaattgtttatttttacttaagtcagttttggcaaattatatttttcctagaagcattcccttcataaagatgtccaatgttttggtgaccaggcacagtggctcacacctgtaatcccaacactttgggaggccgaagtgggcagatcacatgaggtcaggagttcaagaccagcctgaccaacactgtaaaaccctgtctctactaacaatacaaaaattagctgggcgtggtggcacatgcctgtaatcccagctactcaggaggctgaggcaggagaattgcttgaacccgggaggcagaggttgcagtgagccaagatcacgccactgcactctagcctgggcaacagagtgagactccatctcagaaaaaaaaaaaaaaatgtatgtccaatgttttggtataaaattattcacctatcgttttgttatttgtaatgtctgtctgctgtatatgtagcgagactttccttttcatttctagctttttttgtagagtccatttgggtttgttgaacctccctaacaggccttatgtttgtattattaacttttgctcttattttgttatttccttcctatgttctaaacctttctggggtttagtctattattctgttcctatctgacagtggtagccggtaatcaaccggattggtcacacacgcagtgccctacaagttttgtcaccctatgtcacgttgtgtcccacatggtcttctttagtactcccaacgacccttagctctgaactcgtcaacagcctgtctggtcttagatccatttggcacccttcctctgacctcctgtgggatctacgctccccagggtcccttgtcctccggcatcagggtaattttaaccaatgggaagcatgtgagcaagactacaagggagaagccaggatatgtttctcccttcccctctgctcctagtgacatctctggcagtaattactgctatggtgccacacccacggggcaaaaaccaacatggtcttagcttctgccaatggccagactcctagaatctgataacaatacctcctcccattgttcctgcagccctaagggggcaggtgcagcttccggctcttactaaaatctgaattgcctctcagtgtcttcagtcatttgtgtgactaactccctgtattaaattttctttgtttgaaaaaccttgagcaattcccatttcttggctggcaattgatgaatacaaaccctttttataggtgaaccctaaagtgaggttcagagaatttaagagagaagatatagaaatatgagtactcaaccaaaaaaaagaaagaaaaaagaaatgccagtaatgaaaacaccagcacagagcctgagctcaggtctaactctgatattttctagctgtgagatcttctgagcctctgttttcccatatgcagatgtggatggtgactacacctactgcataggactgttgtgaagatgaatgcagccactatttctgacatttaactaagcaaaaagcctggcacatggccacacagctaaacattggctgaactgggatccaaatttcctatttggtgcttattaccctgtgccaagcagcctgaatcaagttgctgatgattttagttctcatgaagggacttcctgtcttaaccttgtggactggatcctttcctcagagattctccccctaagaactcccttccctcctccccccaccgtctccgccacatgaaatgatctcctctcttcccccactgaataactgcaagtggctctcaagctgatttgtcctcccaacttcccataaggaaccagatcactaggcatagctgcagggtataactcagcctcagcctccctgaaagccagcaccaaggagggctatcagagaccccaacacatggcccaaggcccctgtgcccaagagccccctgaacctgctcggaggtgtaattaagtgaactttgaaagcagccctcccactgtgggctcacaaaccccaaggaacccggtctctaatatccctgtgaaagtcagcctagccattcaccaaggaggaagagactgcagcctgtgagcgtagagtctggaatcctaccctggctttatttgggacactttgggcccaaagactctgattttggtgtctattgagtcacatctctacttccctcctttgggagaaatacgtccttgcttatcagtgctgaagcctctaccgcttactatcagtttcgaggatgaacctctgggatccaacagagacttagactcaagaagggagggttaagctggtgcaatactcacccatctaaagccagggcatcatggagtacatcctggagtagctgccttctcaatacacccccatttgggggctcctagatggtttgctctcgtaggcatgccttggcccccaaaagttagattctcagtgcatgcatgtggtcactgacatggtcattcattcattcaacaaaactgccatgattccagcatcatgtgccctctagacagaagaaacactgccccatccctgtcgggggctacacatacaaagaaacaaagcagccttgaatccacccttttatgagctgagtgattttcattatttcttgcattttagaattattttaaacattacctcctcttaggatgcccatgatgtcagaaccatggcagttttgatgaatgaatcaataataagggaatattattagaaagctaataatgtcccttaactttcagaggtacccttatgttaataatcaggtatagtcttatgtattttgtcctatatttataaaacatagatacggcttgaggtttggagaagtaggttgttttattttggttttggtttagttttttgttttgttttacgaaaatgagattatgctatataaatttcttggcaagttgcttatctcagtcatcagaccacagctatcacttcagatcaatccacttatatttgattcatttcatagctgtatcctatgtcatatcacaccatattcagtcattcccctgtaaggaagtgggaaatacatgctcacagcgttaagccattgccgttttgttgcaggatctagattaccctaatccagtggttctcaaagtgtggttcccacagaagcagcatcagcatcatctaggaaattgttagaaatgcaaatttgggggtctgtcccagaactaccacatcttaaactctggggtgggtcacggaaatctgtgttctggcgttctacaggtgattcttgaacacatgttaaagtttgagaaccactgccctaacctgtaccatgtcattcatcttccacgaggactatgtccatttgtttgccctccacaaacaattgcagcaattacagctggatgccagcttctttgcagaaaatattttctcaagctggaaaaatacaagaagtttctagataagcaaacttagatgaggacaagctagctacccagttgctaattaactcattaattcactctttcaggatgtattgaatttatagtcacaggcataatgcaaacatatgcccctgtgtaacatatttggggaaatgtgacaagcagatttttctcaaatgatctggatgcctgatgtgattcttccttaggtgcaaagaggttgcaattggtgagttctgtttgcaaaagaccaaccacctggaaatgcaagcgtggaagccatgagagtgccaaaaaatgtggaagatggaggcagagagaaccagacttgaatcctggccccacctctcacccacactccctgaacctcaagttttgcatctataaaactgtggtgataataaaacctacctatagggctgttgatccaaactgtattttgtagctcctccagggaagttttccagtcaacctaatgcttctctatggctgttcagggaatgaaaaaatgaggaaggaattaatgaattatttcatgagaatgccattttcctctgcttctttcatgttaagaattatatagagcatgtgccactgctgtcttcttcatgaaaccccctgagaggcaagggtggggtggaaggtgaggatggccatgggagtaagcagtaaagctcctgagccgtcatgagcctggctgtccattcaggagctatgaatggaatggtaactaagaggagcagggtgtttcaagcttgagcatgcattagattcccctggaagttttttaaagcacagatgactgagccccaccccagagttttcagattaagtagatctagggtggtgcctgagatttttcatctctaacacattcccagacaatgctgatgctgctggtctggggatcacactttgagaaccactgggttaggtcaatgacccaggctgatgaagtctccaccataatcaacacttggtttctaagattacactgagtgttgacatcccactggcaggagagcaaacaaatgaagaaactccaccttcttcttaagctccctggccagaaagtgatgcacattccttccactcacatgtcataggccccacctttgcaaaaggacctgggaaatttagtccttggatgggctccttcttagtaagccactttcttcccaggcatgcaaaggggtcacagatcacttagtgttgagccactgccactgccgtacatgacaagtcatcacctcatctccaaatcttgggccttgccaccaagatgtgggttagcccagccacaacctcaattcagattccgagagctaaaaatgtactgtgaacagaacatgctctggaagtcatgggagaaggggaagcaggacctatggaaagatggatacctgggcctcatcttccttagactgcttctcaatgacacaagtccatgaatgtctccactcccactgagggcacagtgtgtacagtggaaccatggacttgcagtcggatggaagagccatcactcaccagctgtgtaactttaggcctctctgcccctggtaggtattgctggttgacatagggcagcacccagattgtagctcctccacttcctgccaggcctcctcctccagcctcctcaactcctggccatgaatgtgtgcagcaatgtgacaatagccatcacttctccagcaggttactcacatcatcaaagttggggagttcgaggagataagagacctatgcagattcaatgcctccttatataatccagctcacattctgctttgcccttgccctacagttcctgtcaatccttccttccccacctgcttgttctgttgactgtaggcccagacaccgaagcaatggccccctgtagatggttgaaccagcttccacaactgcacaggatcaaaccctcataagaaagccctcagtttatgccattcttagtggttttgcttctctggctgaatcatgactgatacgggtgcttttcttccaacattctcatttaattttctgaacaactccacaagaacattcttgttagtcttattttagagatgagcaaagtgagaatcagagaggctaagtcacctgtctgagattccacagctagtgagtggtgttggggctgagacttgaacccgggcctctcaaacaccagtactttgaccactatggtattttgtgagctccttcagaagaaaactgggccccatgagatggtcaacgcaatatcaggttttcccctgtgtccatgccaggatcctgctcctctgtgcccccaacaaaggctcatccactgtgacacgggaagaggcttccttgacaagggcctgttgtctgcagagtggccactattttctctcccctgtttcccctctagctctggccagaggttcccagtgggttgattatcccatttttattacaaatcaataggaaaaggagaaaagctttctgagaagattctaagcctaattaaaaacccaggagagggctggacatgatggctcatgcctataatcccagcactttgggaggccgaggcaggcagatcacctgatgtcaggagttcaagaccaacctggccaagatggtgaaatcccgcctctactaaaaacacaaaaattagccaggcatggtggcaggtgcctataatcccagcttctagggaggctgaggcaggagaattgcttgaacccaggaagcagaggttgcagtgagccaagatcgcaccactgcactccagcctgggcggtagagcaagactccatctcaaaaaaaaacacaaacccaggagagaacatccctcaaaactattctgctcttgtgtaaagacacatatgataggagagacggtgcagaagaaagaaacaggcttccattgcgaggtgtggagacctgcccatgagagaggcaaagaaaggcagaaaagaaaacagatgaaaatggagaaaatgacagaggaaagggggagggggaaccaccaaaaacagcaagcgggaagtaacctagatataaaggagggagagaaagggaacaagacataaaatgagaaagaatcagagacaaagaaaaatagaaacagagaataaatgggagaaataggtatagaagaagagaaaaagatggatgaaagaggtgagaatagaagggagagtcagaatgagagagacagagaaagggaaagacagacagagagagagagaggtgactgccaggttcctacataattaactttctcccttggtcccaagtttttggggggagaccagagtggaacccaagacagctggtggggaagggaggcaccctggccactgcccccattgtgctggacagtggccacacttgacacagcagcaggagatagacatctgcctctgagtcagctcctttcttcacagccccacctgccccaccttttgggctaatgttgcagagttaattacagaaagcctgccagactggggatatatgagcctcaggagagcctggttctgaaggcggagggaagaggggagggagaggacggtcagggtcacctactgagctgggcactgaaggtttctactacctggaatggtccctaagcacccacaggcaaaaggtgtctgaggcccaaggaaataaggggaggtctgtcggggctaatgcctaagccacaaagccaattcttccattatggatttagacagctttcccacacttctacctatccctataactttccccagagggttttgccagtctgccatttttttctgcccctttaccacctcctctccccatctgccaatcctttctcctatctgacatctcctcctgtatctaccgtcttccatttacccacctccacccatccatctaaactttcacccaccggaagctccaaaatcccactcctcatccttctaccaactgcctacccacctgccaaacactcttccatcgattcatgtttctttataggccaacttttccacccttcctctaactccttcaacctccacagaaccttcagtcaccaccatttccactatccacatgccaatccttccatccatgaatcagcccctgtatttcccagctcctctccatctgaccttctctctatccatgcaccattctccacttatcttccaaactccttcatccatccaccaatccctccacccatctgccaacttgtccatacatttgtcaacccctcccccttcctccaactcttcacctaccatcccttctttttccaaatcctccatccaaccaccaaaatttccaacccctctctacatttacttccaccctcatcaattcctacattcacatgctaacccatcccttcagggagccatgctcccttccatttatacatacaattccatgtctaatccaccaatacctaaccccatctaccatctcattcatctgtccattcagcaacccttccattccattccaatatgtcaacctcttcctacactgtcaactcctccctccttccatccttcaatcccccaacactccaacaatctcttaatgcacccactgacttcacaaaggccccaacccagccctcagggaagttctgtaaaaagaaaatggttttgcagaactgcagagctgggatataatcttggtttggaacacactggcagcatggctcaattcagtgctccctggcctagtcacagctttgggaaggtcctcaaggccattgaggaagctggacagagtagaaagggaagtaggggaaaggttctctcacctctgttaaggacgctggtaaagttaattacagccagctcctcacccctctccacccaccccaactaactggacagtacagagggaggctcacccccctgatttctgccctgacctgttctgcctgccctaatggacacaaccaggccacagtcccctcctctgcctaaaccccggggttttgagccaactccaaagaccctgaccagccaaagccatgttgaaccaaggcctgagcagattcaccaggctgaggttgcaggtggcccccagcaccacagtggcctactcagtctatatggtcccatctcttaaataccagaaaacctcttgactacttatgagtcagtttagacccaggccaggtagattccaggtaacacagagaggtagaaactgcatcaaacctagatgtaggttatggaatcagcaagacctgggtttgtattcttcttgtacttcctggctgtgtcacttaatatctctgagccacagtgtccttgtttgtaaaatgaaggtcagaaagctcctacctactgcatgggattataattttaaaatatacatacattgggatagagcttgaaacacagtagtcccccatcgagagatgccttcacctcacttggactggctctggtggctaagtcctggtcttctctgtacatcagggaaaacaggacaaattgacattcttagaccaggttgcctgtgctgcaaaactaagccttctccccgaaaaaccccctttataagaatttccacaaaaacaaaaacgaaagcctctgttttttaggtacttttaaatgcctggaaaattttgcaatggggtaaaacttggccagaaagagaaacaaattttttttttgcaaatctcagccctaccttttggcctaggttggccccttgccaaaaatgtgagatgacaggtgaatgtgtgagtttctgtgacttgggtttccaaaatggcattcaacaagtgatctgcctaattgcttttgatatctagaaaagctaattaaggtaataatacttggcacttgtataataataaaaataatgaccctttgtatgtaaggagcatctttcatccaaggattacaaagcctttacaaacattaattaatcctcacaactcacctgtgaggtgggtgtaattagacccaatttatggctggatgaattgaggcatggatggggtgagggatgtggggaagatcacacgctgcatctgctgccaagactgggatggccctgaagattctagaagctgtactcggaattctcacatctgtctggtagaatccctctaagctgtcccaaggaacacccccatgagtcaaagttctctcttgaccagccacggagaaaagcagaacactaggacctcatctggctgggtgaccttcagctagttccttcccctctctgagcctttacttccttccccattagccaagatgactgggttccatgacacctcacctccccagtgttcagccccacaagcttgtcatcctgtttcttgcatcactggcaggttttcagggccttgaagccaccaacaaagacccaggttcagccagcatccctgggcagttaggttgccagatttagcaaagaataatacaagccactgagttagaacttttgaatttctgaaatttttgaatttcagaaaaacaatgaagaatttttcagtataagcatgtctcgtgcaatatttggaacatggttatactaaaacatggtttgttatttatctgaaattcaactttaactgggtgtcctgcgttttgtccaacaaccctgcttgttagccactctgtgccaggcacaggctgaatttctcacatctctgatctcaggtaatccttcccctactctgggaggcaggcattatcactcccattttgccacgaaaactagtctagagaagaaaagcggcctgcccagagtcctgaattcctcacctacctgggtctccctggagtctccactgacacccccagtgattgattccccagtgcccagagaccaaagtccacactccctgaggacagcccttccaggccctgcaaatctgcccctaaagtcctctctagcttcatgtcagcccaagggtcccatcacaggcatatgcaatagattcagtgtaattagtggtgcccagcacccacacttccttccgtcaggcctccaggcctttgcctctgccggtccaaccacctggaatgctgttcctccatcttctcctgcaaaatgcctgcaggtctgcaggatactgtccagtgtcacctcctcagagatgccttccctggccaaacactcgttctgctgtgttaacctctgtgctgccacattccccagcatgcttgcatgcatgtgtgtgtgtgtgtgcattcacgcgtgcatttgtgtgtgcgtgtgtgtgcatgtgtgtactgtgtgtgagtgtgtgtgtgtttgtgtgtgcgtattttctctgtgctccaccctcccatcaccagtacacctagggttgtttcttggccccatgcctcagcatacactatttcctcttcctggaatcatcctccaaaattaagtcattcattcattcaattgatacttattaagcacttgctatgtgttgagcttatccttcctgcccttatgaaatcaacagtctagtgcaggggtcagcaaatttttgtctgtaaagagacagatcgtaaatagttaggctttgcaggccatagggtctgtgtcacaactactccactctgctgttgtagtgtgggtgcagtcatagacggtattagctgggtatggctgtgttcccataaaactttatttacaaaaaaaggcagtaggccacatttggcctattgattctagttcaccaactcctggtctgttcaaaacggacattgagcaaatatcacacaaatgccggatttaacaaatttcttcaatcctgtgaaggcgaagattctactcaaactctccccactctgtgagatcttttagcagtggcctcttcctctgtgctttcagagctcctgagtttagggggctcatgtgtggtcattcaaggcagggaccacctttccaaccagatgccttaagacccactgctgatgctgcacctactcctgcctgaggtgtccctctggggccagatggggctgggctggggtggaccttgtttaggacccctccctagcagaagggaagttctgctcacccctcatccttaaagatgatcctcctgccactccttccaataacttgtctccaattataacccagggtgagccaaactgggcatcttatttaatagagagtgactgtgctcgtatatttgagttagaagcgtcacattttccttcttggcaagaaggaaacataaaaccctctccagagaccccagggccaaaagaagggacagatgtttccagcatcatggctttgtgtcccctccttcggtggttccatcttgctaggctccaaaactgtttttcaggatgtgcaccccgccccaacacacacatacatatgttaaaatcaggccccctatgcattcatacacatgtgttcagcacacaggcttacatacacctcaggtagatgtatgtttacatatataagcacacatggacacacacaaattcctgcttcacacatataccaagagtattcacaacaaggcagacaaatttgggcacaaaaacagattcatctagagacacacaaaccccgaatttttgccccacagctactatacatgtgtgcatgcacacacacactatgcacatgtatgtgcacatgcccacactatgcacatgtgagcacgcacacacatgcacacatgctatgcatgtatatacagtgaaatccaatcccgctacgtcttgcagggggaacaggccgtgaaaatcacatctttgcatttctggcctaccagttccgtctgggttcctgctgccagtctcagctccggggagggacacaggaaattcccatttccctgactgccaaatctcagccacctctgacccttagaaagacagaaactcctccagcttcctgtgagccattcctgctgtgtgcccaacactcctagccaacgtgtggcctgaggagataatgcgaggcttagtgtccagccccatgtgtggctcctgcagtcaaggcagcttccttggcctccccttggggtcagggcctggcatgctaggggcctccagggaagggccttggactgcacccaaggtcaaatgccctctttatctgaaggacgctgaccactttcctgccctgcttccctctgcttccaacatttctagcagccttggggagctcactgtccccagcagccaacgcctactactgctcttttaactcttactgagccgtctgcatccaggctctgctgccttcctagtggggagccagtggcacagatggaagtgacagtggcaggaattaagaagctggtgaaccccagctcccaggctcttggttgaactggaccgcagaatcgggaccccttgtgggtgtcctcctgttgaacaattcactcatccactcattcaaaacacttgggctgaggctctcacctggtgctggggattcagtggtgactagacaagagtcgctgaccttgctgtgggcataaaaacctgggtgccaagggaactcgtcagcatgggcttctgtagtcaggaaagcttctcagagaaagcggcatctgacttgggtctagcaggccaaagagaaatgtgcatggaagaacaagctatatgtaaccaaaagcaaatggaaagggaggctggggctgctgcatagtaggagctctgcaaatgtttgtcgactgaatgaatgaaggggaacttctggaggcttttcagtaaggaagtaatattgattattatttctaagtgatgccatctacttctcaccaaagggcttctttgcccaggatggatggatcttctcccagaggtttaattgctccatggattccctgaccccagtccccaccacacccttacatatagacacaaacacacccacaaacaagtgctggctgcagatgcccacgtgcacacagacactcacacacatgtgagacaaccacacatgtgcaaccacatgcagcccatgtccacatgtctaagaatgataatcatagcaaacacttttatccgactttcccacaggccagatggcagttctctgcatttattaactcagttaattcagccctctaaggtaggaactattgggattcccatttctacagataagaaaactaagccatggagatgagtcagttatccaaagtcatatagttaggaagtggtaggggtgggatttgatctgggccacctgatcccagagaccatgctgataatcactaaagcaaagcggtcccagtatccttctcagcctccctctcactcccagccctccacacttcaccacccatccgtggtccagacacgttgaaacccgtgggatcccccaaacacacaattcgctgccatgctcatctctctgacatgttcccttccatctctttccgaggtccacatctccttatgaggtccgttttattatttgtttaccaaacatttgttaagcacagattatggactgaggctttgtgcttagcattttacgtgcattctctcattcaaccctcactacaaccttatgaatgtcctattgttattagcctcatttcacagatgagtaaactgaggcacaaagttgttaagtcactcccgcaaggtcacaaagagggagagcttggaatggactcaaaccatcttgactcatgagcctcaactcttcatctcatcttagtctgcgtcctgctcagctttggcttctgtgactgagaacaaagtctcagagggaggaagaggagaagatggaagggaggaggaggaggaggaggaagaggagcagcattaaaacaaaactcaaggctagcggagattacgaatcctgagtgtgggtggggtggataggaggattgtagagcgaccttgtaaactttttacccacattttattgtgaatattctgaaagcatggaagagttgaaagcactgtgccatgagcgcccctaaacccactaccttgatttagcaatgagcctctcactattcttgctttatctcctgtctatgcatcttgcaagccatcgatccacttacaatgcagatactttgcagacttcttcaaatctgaagaaatggtcaaggctaagctcccttgggaaaatcactgtgggtgacgcaggttgagatttttactggggcccaagagcctgtgcacagtttacatgtacacacacagttagacgcacgtgagtgtgtgcgcgcacacacacaagggagcaaggacacaaaggatgaagacagtctcaggatttggaagagagccaggactacctcagttgatcagtccaccagttcctttccacctgccaggccccattagccccatcgaggccgccaggggccccaggggctcagggccaggctagggggtggggtatttccctaattggcctgctcgtccttcacccagcagaggaaacagccgctggcttcagcctccaaatgacaggaaacgccacggagggctactcggcagtaattactactttgagaaaggaggggaaaaaaactgagggggaacagttccaactcaaataatccactcatcggggggtggggggaatgggagggtgttccaaggaaaagacattttgaaaagccttcaatcaatctgacaagcaattatctgcttagcggctggtacaaatcccccgctgaggacttgtgccccctcccaggaagaccggagccccagactgacattcagccccccaaagcccccatgccatcctcctagtagccggaaggtgaaacgtgtagattgtaatcccgcctgggaaacttcagctctaggggcagctatggtcagagggagtggctatctgattctttccctccacacacccatatccacacacacacacatgcacacatgcacgcacactctaccctgcacgaccacatgccctgtcccacatgttgtagggtgagtttgtttcaaatattctctccttcccccagcaaccataagcattctctctcatttcattaattcattcaacaaacatttttcttgaagcttcattaggacactggtgataaggatgagagacatccctggtcttctgcatacagctggggaagaaaagtcattgtcacctgctttgtgattcctaccccagtttggggaagcagcatagagaattggagagagcatggctgggaatacaagagctgaattcagacctaagtgtgaccaggcaagctctggtcccctctagggctccagaggccaggttgagggggtctcttctttcctccatccacctgccctaggccaggcctcctcttcttaccaactctcccaggccctaggcctgcctctccctcagcaaatcccagaactgtctctagtccagcctatgtgggacagaaagagagcagacaggtttggcccaccagggagggtttgcccctgccctggacttcgtaaagagctgagaatgagcccccagcagtgcagagtggggccctgacaggcagatgtccttgcccacggtcctgcacacctcttcacacagtgcttgtgtgtatgtgcatatgtgtgtatctcacacacagcccctcactggcacattccgacatcacatgtccgcaggctgcacacatgtgggcttaatgccacaagtgagagtcctgcatccctccctggtctcactcatgggcacacagggtgtcacacctgcacattcaccaccatagatatccgtgctcctccccatgccggcacagactcacacatacacacgcacaaacagccagatatcagccatggatacaaccctcacagtcacaggcactcacacgaatttctcaccccttcacacacccagagtctcatgatggagacagcacatgggaatggagcaggcagggaatggagcgggcagggaatgaagcaggcagcagaggaaagccctcccagacagagtcctcaacagcaccaaagaaggaagccctcatccaagatgcaagtgaggagagaaggcgaaaaggacttccaggccagaggctacagcaagagggagctgaccgggacagggcaaggaaggtcagaaccctggccaggaagcagcctgggttcacagttaggagagcagagatctcagggaacagcagagtggcaggcctcgtggaatgatgatgcctgcccaccaacaccatactgtcctgaacagaaacacacacatgcaggctctctgtcaacctgcaaggcacgagggccgtcactagtcaaaacatgcttcagggtgaggaggtctgctccagctctgttgcaaatggagggagtttctgctttcatgcagtgcagtcaggggatgggagttgggtttagcttggggctaatcttgtacctgagttcttctggtcataaaacatgagggtgtgtctttttggggacatggtgagccatgtgcctgctttccagtgcatcagatatgtcttgccaatctctgagggcaaaatgaaatgtcttgggagagcaaacagccgcctccctcctgtgccaggagagcagaatcattttgctctgtctacacaagcattcctgtcctctccctgctgatggccttgggagataatgtgttccatgtgtgtccctgagtacggggacagctgtcgtaaatgtagtgggagctgcaatggcctatgtgtctggatgaagtgggttccatgtctttccaggttgcagactcttgagggaagcaggatcccatatcccagggctgtaatgtcagagagggcctgccagggtcagtatttgcctcttcacccagctctgggcagagcctgaagggctggctagcagactccagccatggaaggtagagctggaattagttcttctgctctaagaatggagtgtggggcctacctggctggacatggagcttagtttttgatctgcacccaaggtcccagtgcaaaacacagggcactggttttcacgtgtgtcttatctggttttcccatcagagcacacaactttgtttatgagaccgtctgtggattccaagatgggcaatgatagaaatgagcagagctaacatttattgtgcatttgctccgtgtcaagcactttacacggaatttctcttctaagctgttgatatctcaaagtgcttaacagcatggatatcagagttagcaggacttgggtttagattctgacttttctgctcagagctgtgtgaccctgggcaagtcacctgtctgagtgtctgtcgacaccaactgtccattcatccatctatccttccatttcatcagcatttatggatgcctacctatgcccagcctcgtacctggcactggaagtgaatggacaaataagacactgtttctaagaactcgagtgccagaggtggagacagtggaggtgatatcatcaggaggggcagcgtagcagagtggaaactttggcaacacacaaactggggtcagatttcagatctgtcccttcccagaaacgcaaccccagcaagtgacttgtcttcagcaagtctcagtccccattaagtggactgaggatgatgatggtgcctacctcctttggttgttggggagatgacatgggacattgcttgtaaagtgctgagccctgggcctgctgcattgagactctcagtgagtgccagctggtgtcattgatcacttctgtaaaatgggtataacaatacccagcctctccacctttataatgaagttgtatcaaataagatcatgtgtggtaagtgtgctttataaatggtggagtgcttattttatcactcattcattcagctaaccattccttgacagcctgcaaagggccaaggctacagctaggaatgagattatcaaacaggagcaagaggtaagggaaacacagatgtggctacagagtccggcatctgggaatgaagatcaattatgatcctgatgcaataagaacagccacaaaagcttctacagaggagggcaaaggaggtggtcattagctaactggtgacgtcaaggaaagcttcctggaagaaaaagagttagcattggtgctgcaaggatgaatgggcattgaagcttcaccttttaagtctgagcaagcttacactctaataagagaatcagaatgtcttcagtgacacaagaaggggtggacacaggcagattttactcattacccatccagtgtacagagaagtggtggagttctgaggacagaaatctgagaagcttggagccagctggactcaggctcggccttggaaccaggaggagcaaaagggcagaatgtgttgcctgagttctcagtggtccctcaatccacagcgacatcttccacaagtgtcaattgcagagccaagattggaacctgtatctggctgttcatgacactctgtcagactcaacagaggtgctcagttctgggctgggttatgagcctcagtttgaggtggctaacctcaccaccacatgcccctacctcaaatactctcattttctgtcttttcatgaacactctgtaaactttccctgtgaagttcttccaaatcagtccttttctgctggctatagaaaccagactgcgcactcaccccaaatagcaccccctcctcagccccataagcacgtttttacctcctcaaaccacttaccactgtcactaggacctaatgtaagtcagaggggaggccattggctgacatccactccaggaagtcacattagcaacttcattcatcagggtcaggattgagcttccattgtctgctgtaaccatttgtttatttcaactttggcggcagccccggtttattacagttatcactgtctgggatgggagagaatatacttgcctttcacacataggaatggcattcttgcattttgtagcaaaagactcacctgactcaatacctccccaaatatcaaataatgttaaaaagagaatataaatctattgatacatattctatatatgtatacatctttgaatccacaaatcaatcattttattttattttagaagaataaggaataactgtttatccagcagcaaacaaaataataaacaataatacctaatgctggtaaggtttccttgaagtggctaaacggacaaactttgctggaggcaatgtaaatgaggacatcctttatggaaagtaaattggaaaatatgtatcacaaaccacaaaaatgttcctaccctgagacccactgattctgcttctgggaatttatcctaaggaaatgagacaaagagaaacactctgtggaaaaggagaagagttcattgaagcaatatttcaaatagggggaaattgaaagtaaaattcaacaatactcaacatcaatttgatgaaataatagggaaccattaacatgataatctgtaatattggtggagcaagcaaaggcacacgtatactgtattcacctttcaagtttaagaccagcatgtacaaactacatattaacatataagtcactgtacttgcaatgggaggctggtagccttatggagaaggtttttgcccttgttttctaaacttccagttgggttctatatggttttatagtttcttttaactggagctgacaaatgatcatgcttcacgaaagaactacaaacagtgcctaattagacacagcagctttcacaagaccctcagcctgtctaggcttcatttccatgttccttaagatcctttgccccataaatgtagtgtgggaaatagacgggcctggcaagtctttttaagtctctaagtccagtgctgtgaggaagaatggatttgtcaaaacaatggctgatggtagttgagcacttcatacccatccattaaatttggtcctcatgggccgggcgtggtggctcacgcctgtaatcccagcactttgggaaccgaggcaggcagatcacctgaggtcaggagttggagatcagcctggccaacatggtgaaaccccgtctctactaaaaatacaagaattagccaggcgtggtggcgcatgcctgtaatcccagctactcgggaggctgaagcaggagaatctcttgaacctgagaggtggaggttgcggtgagccaagattgtgccattgcactctagcctgggcaacaaaagcaaaactctgtcagaaaaaaaattggtcctctacaaccctgcatagtggattgtatcatccccattttacaaatgggaaaactgaaggttgtccaggaacaacacaggtggtaaggagaggagccaggattcaaatccacaactcttcactccatagcctgttttgttgttgtgtttcccaattcatgttgattatttttctcaaatggatatagtttaaaagaagttgattcactaaaataagttcgaagttgtggcttgaagggaactcccggcagcccattcaggctgcctgggaggcccttctgtcttgaaagggaacatacagttggctggctttgcctgaaggaggaggactggcccagccagcggctgcaaaacctattgggttcaagcattccaaaagaaaacacccccttcaccaagaatgtacctcaataaccacagaaacaggccccaaagaagaaaaaggggcttgggggagcctctgactggctgctggtgatgtcatgccccagcccagaatgcctgtaagagggcctactctgggcgactttatgggggctttggtgtctgcatgctccctccctggcagccaggccagcatgacggctcctgtccgcctccctgccccctgcacatccccagcgtctctgccctggcctctcccagcctgtaattactttcagtgccctgctttatgggctccagcgagggggactttgcagcaagaggaggttccttgaaagggacccaggaatctttccagaagggcctctttctccctgctctctgagaggctttgaaagcagagccaggaggcattgtggggcctggcctcctcagacaccctcccagctcccaggtcttcttacctggcccactggctggcactcccttgccgacaatctttcagttgtccctggggactcttagaataaaataaaaatcattccctgtggcttccaagtctggggtctgcctcatcactcacaatcccccacccccacccccacagaccagctgtaatggtccacccaccattcacagacacaccacccttccttgcttctgagcttcctcaaatgccggtccccctactggaacacttgtctctcttctctctctgctcaccccattttagccgactaactcccactcacccttgaggtctccattcttttccttccattcttttccttcagggatcttctgtggacctctgtcccagctgggctcagtgcctcctcttctaggctcacagagcccccgagctttgtcctatgccatggtcatttgggtccctctggaagtaaactctacaatgaagattgaaggtaatttatgtggaaggtgaacgcaacatctgctggcagggaaatgagaaatgaggcagggacaggaaggcagccaataaagaatattatcaggcaagttcccaccatgggcaactagaggttcattctgctaggagctccagagttcagtgtagaacacacagctctgagttatctcagcctagagggaaggagccgtggtattaatccaccaggcccatcaatcattggttggagctattccagatggacgtcaattttctagcttgccccaagtgtaggcacagtgggcttgggcagggagagaaagtccctgggctgggactgagtagtcagggggaagtcaggactacaacggtgaggtccaaagggagataagtaggccctgacatctgctctactcacagccccaccagcccacactgcagttgcctcttctctgctgtctcttcaaccagaaaataagcttcaggcagacaggcatctcttcaattttgtttatgactgcattctctacataggcacattgggtgaatcaaaattatgtcctgcttggggtgggtccacaagccaaccactggttgagggattctatcacatgtcctcacttttccagctagtaaacccaaagatcccagaggcagagccttgagaagaaacttggagcaccttccattattataagtgttggccagaaacttcgagggtcaagcttgcccctggaagatccatgggcaaggacaaccgcaggcagagccagaggcctggattcaaatcccagatctgccaattactgtgtggccttgggcaagttgctcaatctgtctgtacttcagtttcctcaactatagtaactccataaggtaggcacaattaatagcattattacaaaattctaatgaaattgtgtatgtaatatgtttggtcatcattaaaatgattcttacctcctaagtatataatgagctgcctggattttaaaaaaaatgatttttacagaaaagccaggtttaatcctaaaccttaagggttccctgatacacgcacctaccctatgccaggcattgtgctagaggcattacacacgtccagcagcccatccactacgggcctgccttcaatggcacttctaacctattgtgctttgaacacctctagtgataggatactcactacatcacaagggaaccagatagattttcaaacagctctaaatgtctaatacagaaccatgctcacaggaaacatggagctctctttgcccacaacagcctcttggaaatatgagggagtggtcctgatgtcagctttctctctcccacatcaggagcgtgttccctcacagaacatgactgtgaggtcctatgtctccaaggtctcactctttccctccactggaaggtctccagtacctctgaattaaatgagagccacccgtgagggtgatctaagcagtgcagaacacaatgtatctcatcccctgctcgggacactttcttctattcatgcagtcaggggttgcatcagcattttggcagctggaacacagcatgtggccctgggcaaaccatttggtttctctgagtctcagtgtctatccataaagtaaagacaatacaggcacctaactcataaagctgttgggatgattaaatggaatgatacacgaaaagctcttaacacaatactgaaaaagtgtaggtaatattgggagccggctaaaagccatagctatgcctctttcacatgaggtcttttgaaactgggtttttcccatctttggtcttttccaacaaagtcagcaagactttgtcagactttaactgagtccatgttaaatatgttgactaagaatggaccaaagaagaccccttggcatggtccagagactccccatcaagagtgccatgagtgcactgatgaccattccgtgggaatgaatgctctgccccctatcacctccctcagcctcgctatgcctcccctgtcccctggatgtggagatccaagggctgaccacgctgttgcgttcatctctgtgtctccagattcttgccgagtgactggcccaagaacatgaattgaatttcccctattcacagatggcctagagccaggaagacagtttttgtgaggtctctatttttattctcattttacatgaaacagcattaatgatcacaaaggtagctgttataggcattcagcaggcatcagatcttcctgtactggctcaccaaatcctcactacggcatcattgctgcctccactattcaggtaaggaaactgagactcagatgaattaagtgatttgcccaagaccccatggacacaaagtgatagaagcaagatttgaacccaggcctataaagctacaagccaccttcctcctctacctggaagaatttttttattttttatttttattattattattattttttgagacagagttttggtcttgttgcccaggccgtagtgcaatggcgctatcttcactcactgcaatctccgcctcccgggttcaagcgattctcctgcctcggcatccagagtagctggaacgacaggcatgtgccaccacgccgggctaattttttgtatttttagagagacggggttttaccatgttggccagggtgatctcgaactcctgaccccaggtgatccacacaccttggcctcccaaagtcctgggattacaggcgtgagccaccacacgtggtgacctggaagattttaaagtgcttttctaatgctaaaagttgaggggaaaatgtatttggtcatgcagttcagctcacaggcctgatcccagagagctgcaacagcataaaccatctatggcagttttaaaacatagccataaatcctgtgacactactcccagtaggatgtgcacctatggtccctccccgtgaaccagagggacttatgactgctttgaccaatagagtacagaagtgacactatatgatttcctaggctatatcataacatgccatgaggcatctaccttatttaatggagccattgtactgagagtcaggagactgctattaagaaactctaatgctctactaacctgagaccacaatgctggaagctatatgtaggtgttctagctgacagttgcatgtgagccctgacttcaaccagaccaacccaggcaccagaaataagaatgaagaagccatcttgaaagtggattccccagccccagccattcaagtcatcccaggtgaggtccccagatgtcatgaagcagagatgagctgtctcttctgtgactttcctaattcctgacccactgaacttgtgagtgtactgaaaggggtgttgttttataccagcaagttgtggggtggtttgttctgcagcaaaaaagagataatcagaacaccatctgacccaacagctcatttctcaatgctctgaacttgttgatggaaatgcactttgattttcaaagtcagaagttccatatggaccattcagaaagtcatatctgacccagatactttggctgagtaagaggctaggcttgctagagacctggacttcagcgtcctgataattttggtgtcccatctgttcatttattagtagttattgcattgccaccttgtgccaggcactgtgctaggcatggagataccacgataaacaaaatggacatcggccttgcccacaggagctcacactccagtgggggagacagataccacataagaaattttaagttaaaaatggagatgcacagccttagggtcatctaaccatgtgtggccaagggagcaggactggcctaagaaggtgaccatccgagggctgaacaacagaggcagtgcccatctgatgtggaagaggcagagacaagaactgcaggcagagagaacagccggaggggaggctgtgctgagagaatgcatgaggcattcaaggacacaacagatatctggtgtggctggaatgaagacactgaggcagagtggtgagaggagatgctggacagggctgctgggtggaaatggatgggttatcccagcctaggtccccatccagccccagtcccaaactgctggccagctgaccacgtctgcttcttggagtcccctggctttcctctcatctctgactgttccttctccgtttccttggctgccttctcgttctccaatcattgccacatgtgagcattccctcctcacaaaacactcatagttctcagttgctcatgcgctcttctgataaccccaaaatattaagttgaaacacagggaatggcaatatttgaccatgtgtgacttaagaaaaaacatcacccagcaatttcaatggttcagcttaattttaagctattgcccctttcaagttatcttctgcagtgtcccaatcagcagagaaagtcttgactttattattttctgaggtttgtcattttcaaatctttccaaatatgaaattatataataatttcaaataaaattatgtaatctgaaccctttgaattccaccatgcccctctaaccacacctcccaaggcctcaaccccaactcctagatatgagacactgctccattttggtccagagggttctcaccaccctcatcttttcagactcttccacatccactggaaggttcctaagaacattaaaagtcttagagggaattgaggaaaacagcaggttggagaggttgaaactcagaatgaaataagtttggagatgatcccagcaattgctgagaatggcctatggcaggtgtccaaggtgcccagaatctaaatctgaaaggcccatgcatttatttctgccctgaacccaagaatacgatagaaaaacacaggggctaaaaaggctctcaggcttacttctccaaccagccagccagaccctgcctgatacagatagggaaactgaggagacctagagacaaaaagggatacacatcagaccttgccttgaggttgagcttagggctagaaaccaggtgtcccagtgctccatctacccctccactcctgcagagtggggcaagagtcctgagtggccagctggccatgtccaagcctgaggccagacactgctcacatgcactgctgtttgctcaagggaacaggcctgtggccatctggtcacatgtcaggcattggagtgtgaatggccagacagaggcataggtgtgggggtggatcgcaggatggagggtaattttttaaactgctctgcatcactgtccccagagatactgagaaattgggtgaaagcgcaccatctctggagcctcagccacctgggtcagggatgcggcatactatgccccctggtcaatcctgcacctttccaggcctgggaatcctgggtttttgtcccaatgtgctagagactcttgtttgtccctagcactggcccactcagaggtgaaggattgttctgggccttgcaagagctagtgtggtaaggacaggctggatctgactctttctctctctctctctttctctgtatgcgtgtgtgggtctgtgtgtctgtgtaggtgtgtgtgtgccagagagagccacagagagacaggcaccaagtgcagctccaccgtcctcattactagccagcatctactgctacctcctctgtgcccacggaaagaggaaagaaatgggaatccttccttgaccctgaggaatagctcagtccccaatgagggcaaaatctactgagcacctaccatgcactgagtgccttattgcacctcccaatttaatctgctcaacaatcctctcaggaaggggccattacttgtgtcacagctgaggaaacagagacacagcaaggctaatgggcatgcctatgggaagctccatgaggagcaggtgctaatctgcctttgctcaccatttaattcccaatggttggtacaacagatgtagatgcccagtaaatctttgttgaatgagtgagttgaataaatgaatgaagtgtcagaagcaggactggaagtggggtctgtctgctccaacggccaagatgtctcttaatttgcagacacgtaaaatgtgcactaagaggagtcaacacaaagcagtgtggaaacagaaactacagtgtcaggcattgccagggggccaagggtagcacaaaaagcagactccatttgattgaggttttgaagcttacataggagttttctgggctggccattcattctccaaatatttaataaccatctatcacatgcctggtactgttctaggagattgggatccatcagtgaggatgtaagatttttgtcctcaggggacttatatttaagaggaccagggagtgaggttgttccaggcggagcatgtagagcagggagggaaaagaggtttgtcttgggaaggaagaatatggggttcatcaagtggagcatgtatgaagtgcaagttgagaagaagctgctgatgaattggaccagggtctagagggctctgagtgcctaagagcagatgagaatgaggggagggttttagatttggctgtacatgtgtcaaggggaaaagtcaacttccaactcattgacctagtgtccttgactgcattcatggttacttttgtatacctactttttgtgtttttcttctattttaagtcatagatacagccatgaaaaatcttcagctccagaaacaagttcttagtgccatttaaaagggaaaaaaagttatttttgctcattattcacctttttcatatcttatatgattttggtattgaaaaatatttatttccacatttaaagctggaatctgccaggtgcagtggctcactcctgtaatctcagcactttgggaggccgaggcaggtggatcacctgagatcaggagtttgagaccagcccaaccaacagggggaaaccccatctctactaaaaatacaaaatttgccgggcatggtagctagcccatgcttgtaatcttagctactctggaggctgaggcaggagaatcgcttgaacctaggagctggagtttgcagtgagccaagatagcgctattatactccagcctgggcaacaagagcaaaactccgtctcaaaaaataataatactaaataaataaatgaaataaaaaataaaaaaataaagctttttttttttacgtcaggtgtccagactccagtacgggtggttaagttgcttataaaattatgtgacatgttttaatttctttaaatcaatcaatcaatcattcatgatgcctttggcaggaaaaagatagaaagcaggcttttattttattaagaagtggagttgtcaacatttcaaatgggaggttacctgacccacgtttctgcagattgttggggaaaagttaaagaagacaactttgggggtgaatttggatgtggctctgcagaagagaaggaagtggtgggtcttgtgtccagctgggactcactgggatgtgggagtgagggtggaatacagtttggggcagctcctcctgcagtgagaaaaaggtgagaagatgatagctgatctccattgggtcaggtagggctgcctgcccaggtcagggagaagattccaaggatccagtggcaagtaaggaagtgaagataaagaaaagaaagggaaattagacaaggaatcttagggtctttgtaagacaggaatggtgagtggggtgatgaagatccagacatgggcgggctggggaccagggtctgcagagacaggaacaggcaggggccaaatgataagagtacccaggatacagcttgacccatagcagatgctcagaatggtcttggccaccaggctgatggccttttttgataggtttgatagctttttggcagctttggtactttggatcctttttatgtactcaggggcacccttgctaaaggccttccattcattctttatctcattttacagatgaagaaacagaggctcagagaggttaagtggcttagccagggtcacaaagcttgtaagtaatagaatcatggcttgaacccagttccatgtgaatccaacacctgagttctttgtctctcttgggatcttgtcctgcaggagaaggaagtgcaaagaccaggctgcatatgattttcatgggcccttaggaacttttgtttttatggacccctttctttatgaaaatatgctaaaattctaatttatggctattaatataaagatgaatataatccaggatgcattatattaacattttttctgctgattttaaagaaatagaaacaattccttggacccctgaaagtattgcaggctgtaggtacagtgcctactgtgcctgctggtgaagttggccctggtcaaagatgcttcatgggtgtgatctctgtacttaagcaagcagtcagtcccctttcaaactaaccaaagccactctgtgaggatgtagccctcgggagctacccagtggatcaggggtgctcctgtggcacatgccagggacccctgcaggaggccagcctcctgaccatggcattgccttggtttttttggaggggggacagaatcttgctctgtcgcccaggctggagaacagaggagtgatcttggcttactgcaacctctgcctcccaggttcaagcgattctcctgcctccgcctcctgaatagctgggattacaggcatgcaccactatgcctggctaatttttctgcatttttgtagagatggggtttcaccacgttggccaggctggtctcgaactactaggctcacgtgatccacccgccttggcctcccagagttctgggattacgggtgtgagccaccacacccagctgccatggcacttcttgaaacatctccacctcttcaactgaacaggcagagacagaaaaggtccagcggccatgaaactcagaccaggccaaatttgtgcacacagagcaagggcaggaatatccagcctacctgaagcaccagctctgcccctcccccagcactggaggtgaacagaggctccggctgctctctgccctcctcctggaactgtcagctccagcaactgacatctgctccctgggaagagctgggtccccatggatgacctttggcatctctgtctttccccccatcactcctggcaagaagactgggcacaggggttgggagacaactgtccccagcccagcctctcagaacctgcaggcccactctcaccctgagctgtagaagtctccccatctcagcctccagaggcctcggtatctctcttctggaaatcaaaaccacccttcctagggcttcctgacaactccccataccagcccctgttgttagctttctgaaaaaataactgtcagcccttactgtacgccaggctctgtgctgaacaccacacttcttcaatgctcaggacaactccaggaagtaggtgctattatcgcctcatggggagcaatatgagatgaagagacttgctgatggtcgagcagcagtaagtgtgtaagacaggctgtgtcaggattcaaaccctgcctgtctgcctccaagcaccaggcatcctgcctcttaggcctccagtgctttcaggttaaactccctggtgcctcttggacaaagcccaaactctgtagtctggctgtcaaggtctgtcttactctggcctctaccctgtaatggccctcacacacactgctctcccacaggggagaaggcacactccaacagtccagaaccactggagcttctctaaactcccgcgtggtttcaccctcctgtgcctttgtgcattcagtttccccagcctggaacacccttcccagtggaggatctccagtggattgggcaatggggttttgagtcagccctatggggatctgaatcccaccgctgtccctgggtccaactgtgtcaccttgggcacgtcatcccctctctctgaacactgatttcctcaactgtaaaactggagccaccaggcctacttcatactgttttcaaaggaattccctgagaagggatatgaggcgcgacaggcatggagtgagaactcagtggatattccctgtgctggccccatgtggtcaccctctctccacattcgttcatctttcagctcaaacatccccacccctgagatgccttctgtgagtccctcgaccagggaggctgagcgctggcccctgggctgtgagccccagcacagggccagctgtgtggtgtgtgttggaagaagagagaagggagggagaggaaaaaattaagtgggtcagaagaaggcagctgggggttgataaatgagattggacaatggagaataatagtggaaaatgacttgggccttaattatttggtaattaggtccaaagtggctcgaaacaggaaggcaggtgactgtgttcagccagattgcccaggtaactggctgtgtaggcaggcccatcacttgtcaggatccccgtggactggactccatgccccacttacctcctacccgcaaggcatctcagactcaattagggtcccccacaccccggactggactgagtggaaagcctcagaagcagggcggggctcaactctcatcttgtgggctgctggtgatttagggggagcttttcaaaatggctttctgtcttctccattcctacccaattcctatcccccttgccctcctcacaccctccccgtctccatcctccccatccccatcaccccttcctccatcccctccctcctcctcctctgggtctccatctcttcccagagagccctggtaataatcacctccaaaccggcccaaccggtcccagaggacctgatggcctggcctggcctggcctggcctgtccctgccccagaggcaggtaaggaggtggggcggcgactcctggagtgtctgaaagcaccaattacctctgcagtccgctggcctgcccagccagcccagcaaggggccctggggttgggagggggggaggcgggcagggcaggctgttccggacaaggggactgcatttcagaccctaccacagtgcagggacacgacatcccaaaatgtccctccctcttctgtgagctgacaggtctaaacaattctgccaaatctgacacattgactcacgtttaaattacacatggaaccaatcatctggttgaaatgagtgaagtttcataaaaggagatgtaaaattcaggaaaaaaaatagcaactttttttcttgacagatacattgtttgaagctttgacatgacctgtcttagaaaacccctttcagagccagggattccagactgttttatctacctggtgcttcatgccccttagccagtgatagaggttgttggggggaaggcgggggaggggagcagagtctgggaagggaggctggttggaacagcatgaaatgtgtgtgcgtgattgtgagtgtgaatgtatagggatgcgtgtctgtaactgtatgagtaagtaaatgtaacccagatggcttcggttcaaatcccagctccacttcttctcagctgtgtgaccctgggcaagttacttaacctctctgtgtcttggtttccccacctgtaaaatgagtagatataaaatggataaaggaagagtaacctgcctcctagcatggcaataaggattgaatgatttaataaatgcgtagcacttagcagaaggcaggtggtgggcatgactgaagtgttcaacatcattactatcattagtatctgtattaatagaattagtattaataatattatcatgaccatgattactacttagaaacatgcctgaccccataagcattcattccaagttcactggtagcactaattgtattcatgcacatgtgtgcggtatgataggagaagggccccgtggatgagcaaatctttctggataaatggtagctctatattatagctttccttacaattctataggttggatgtttggcacaggtctcactgggctaaattcatggtgtcatcagtgcaaccttcaattctggaggctgtagggggaaattcatttccttgctgtttcaagcttatagagaccacctgcgttccttggttcgtgcctcccttcctccatcttcaaagccagtaccattgcattctctaacccagcttccctggccacatctccctttgaccacacctgggaaagttctccacttttgagaaccatgttgatgacatttgttccacccaaataatccaggcaatctttccaatctcaaagtcattgactttaatcacatctgcaaagtccttgtttgccacaataaggcaacatattcacaggttctggggattaggatgtggacatctttggaaaaccattattctgcccctagcctagggggataatggaaacaggccctcatggctctcaatttgttgtggtggaatcgcatcagtgagtgtctcttctggggctttgggcgctaaaagaggctgaagacagctggacccacgatggacaagcgacagctccactaagggccccagatcccatatctggccaggtttggcaacttctcccagatccaaaagggcagcaaggtgtggaccaggctctgccactgacccgctgtgtgtctgtgtggaagcagctccctgtctaagcctctaagattccttgtctgtaaaccttttgaggaccacacaataacacacgaggctcctaggacagcggggcatgcagtaggggctcggtaagtttcaatctgccctctccacaacctggaggtcaggtgcacaattaccacagcaggcaggtgtgtggcaaggaaacccatactggtatcagggactgtgactaggttctggtgggggactgtgttgtgggtaggaaagagtgtggatgtgggagcaagaaagtggaaatcagtgtgtaagagagggcgtcccggcatgcagaacccagccccgtgccccttcccgagggcccagagcctcccacccaggttcacctgaaagttaaagccagcgcacacagccccccacagttctgcgagcctgaccacggtgcacagtgcaaggcatggctttgaagtctcctgttttacacttcctaatccagaggatgcccactgctgttgtataataaagggcaatgtttcacattgcaaattctcagaacaccgagcggctgtgaaaaagcatgaggtcagactctgtacagacgagatgtcccaaacacattgttaagcaaaagaaaaaagtgggtgtcatagcatcaagtatggattggacccattttttttaaagtagccatcttgccaagttttaaaatgcaaatgttttcaaggcacaaggtagaaagtggacagatgtgaggctccagggagaagtgaggcctgtgtcaaactgcacagcgtaagctccgtgtaaaaacattcaaatcccagttttcaaagcaggcagtcagcttttgacctctatagtctttgaaaagagagtgaaggccgggcgcggtggctcacgcctgtaatcccagcactttgggaggccgaggcgggcggatcacgaggtcaggagatcgagaccatcccggctaaaacggtgaaaccccgtctctactaaaaatacaaaaaattagccgggcgtagtggtgggcgcctgtagtcccagctacttgggaggctgaggcaggagaatggcgtgaacccgggaagcggagcttgcagtgagccgagatcccgccactgcactccagcctgggcgacagagcgagactccgtctcaaaaaaaaaaaaaaaaagaaaaaaaaaagaaaagagagtgaaaaaaatgtggtatgtgtgggtatgcaggtgctgcgtgtttgtgtgtgtatggggtgtgtgtgcatgtggggtgtgtgtgtgcatgtccagtatgtatgcatctgtggtgtatatgtgtgcatatatgtgtgtatatgtgtggtatgtatgtggcttatgtatgtggtatgtgtgtataatgtgtatgtgcaagtggcatgtgtgtggtgtgtgtgcgtgtgtatggtgtgtcatagtgtgtgtgcgtgtgtgtagtgtttgtggtacacttgcatgtgcgtggtgtgtgtaatagtgtgtgtgtgcacatggtgtgtgtgtacaaaaatgtgtgttgggggatggtgtatgtgagactgtgtgtggtgtatgtggattgtatacatggtgtctgtttctgtggtgtgtgtgtgcatgtggaggggtgcatgtgtgcatgtgtgtggtgtgtgtaatagtgtgtgtgcacatggtgtgtgtacacatatatgtgtgtgtgaagggatgatgtatgtgagagtgtgtggtttatgtggattgtatacatggtgtctgtttctgtggtgtgtgtgcatgtggggggtgtatatgtgcatgtgtgtggtatatgtgtaatagtgcgtgtgtgcatatacaagttcatgatggctttgtagtgggagaaaagagtttcaggactctgagtctttttttttctgtttacattgtacattttcttagttttttaaaacaagcttatacaagtatcccaaaagtcttaatgcaagtttaagcttaacaaactattactcctttaatcagaaaaaaacaaagacaaaaaaggaaatatatgacaaaagtctgtgtaaaaacgttacaccaggaaaatcagcaatgtttgtcttacagtttcagtaccactgggtattcctgatactgactcgagtcaaggctggtgggaaatctgtgctccctccagccccagggacatagcaggtctgcctggagagtcgctgcttgggccccagagaaagtcagcagcatctaaagccaaaacacgggatgttttctggagtcctgcacacaggcacaagcaacacacacagagctctatgcacaaatccccctttcagtgcacattatttgttctcagcaagccctggtctaggccgtggcagatccggcttccacagctgactgcccctgaccctggacatggcattgttactttctgacccttgacttgcccctctgcaaaatgaagtcagataaaagataatgcatccaaagtgcctattgcaggacctgatacatggtaggtgctcactaaatagggtttatgaagaagaggaagcccacagcccatccccgctccctgggctccagccagataggagtatgtcataggaggcctgctggccgcctggagagagcagagtccactgatcttatcaggtcagcctcactctgccccacgcagagctgacttctgtcctctagccacccagacatgtggtcccagatgaatcagtacatgtgtaacatgatctggtggccccaaggctcagagtcatcactgcttacctatgagggaagaaagataatccccttttgcagatgggaaagctaaaactaaggttatttaacttctatttttacatcttctgtcattgattcatttgatgtttaaatgagatgtgtgtgagaagtaggcactgcatgaggcttgggccaggaggagacagcagtaaaccagacctacaatgtccatgctgccacagagacaggaccagcttcaccggcatgcgacctgcatagtcacacaggactctgcagttagaaagggcaatgcctggtttaatgttctgctttggccatcttgaatgtcttaatactttttaaacaaaattttattttatttccattttgcactgggccctgcacattatgtaagtggtggtgttaggagttaagaggtcataaatccaaattaacagtgcccagcagatgaatatatctacaagggaatcagagcaaatcttggaaacatgggggtttaaccatggtggaggtggggagtagctgacccaatctaaagctttagtccttgccttcctaagggaataacattttggcagtagcctgaaaggcaagtagaaatgggtaaagaggtggaaatgaagtttcttaactataaaatggaaacagcgatctcctgaccccacaggaccagccatgacaaaattttactcaattcattccattcattcattccagcaacatacagcacccactctgctgcaagtgctgaccaggcaccccatacatccctgtcctgtgaaacgtgtgttctagcagataattatttatctattcctgggatttgtgcaggaaagaggtgtacagggtgctaacggagcacgtgatgggggctggactgggttgggggcacagttctcagccccgcccagggctgggcacagaggaggctctaggagattgcaggctggcagagcctggctctgcagagcagtcagctgtggacacaggcccaggagggagctatgggccctgctgatttgaggaggcaccatgccagcagcagcctggctgtgtcctggtcccagaggcagtgagtagaccttaggaggagctggcccagggcaggagagggtaaaagagaaataaaaagtttaattaaagagaggcagcttttggagggagggaataaagcaggctagccttactgactagctgctgtgtccctgctacttcatcgcatctgtcagatcaccttcatggccctctacagcatgtgcctctatgttacagtacaggaaactaagtctcagacaggctaagcaacctcccaagttcatgtatgatgttggaaccagtatctagtcttctgattcccagagtaaattctgctgcttctacccatgtcccctctgaacaaaaatctgcccaggtatttgacgagccgccagagaaatttctttccagcccagaaccagcaatacttacatctctcctgagcagtgggtttgcttttccttgagaaacaccatgggtctcacagttgatcttttttccctcttcccattggccactaggaggcccagcatcaactcttggcccatctcaacacagcttttatgtcatcatgtcacttctagttcaatctggactcatctaccttgcttttattttctgccttttgtttttgttttctgtttggggggtctttttaaactaatttttaatgtgctttggctcactctattatacagtttcattaagccatctccaacctcttctgcattctctacatgcctgctttgcccctccttctctgcagagagcctttctgtggctccttatgcacaaggcctgggtgaggcttcctggcttcctgttctcaccctttcccattcaagctcccaccacactctgaccagtacccagaattcaaacaccaatttccaaggaaagatgaggcttttggcccaacttgctccaaacaactgtggccatgggctgggtcacacagcagaaatatggcagcagcattccatccctgcagggtgataaccaggctccttaccctggctctcaaggtcccttaggacctgtgtgcagcctctgcttcccagttccagttatccagcacctcactccccagccacatggggcctacttgctgttctggaaactccctccattgccacctgtgagctttcacccaggctaattcctccactgagagccctgtcccccagctccatctgtctaagttgatgacaaacccaaaggctgcctcctctcctaagcctgctccatcctccccaccagctcttatcctcctcttggctcccactccatgtcctttatccaccttcctgaccctgcaccctgagtttccataaggctcaaacatccctcacaagatgccagactccaggaagacagagactctggagccatcaccacatgccttgtggtgagacagatctcagttcaaatcctagctcagccacttagcaggaggacttggcaaacctcccaggctctggaagcccccactcacagtcacatggagttatggttgggttgtacgagaatcagcaaagtcaggagtgcagaagggctgagcgtggagcaggcgccgagtgtttgatgagtgaatgagtggatttgtgccagaagctgagcgtgttcttagtaacttacatatacacttcactctcaaactcttgggcagtggcccatatacctgtccatgaccttcttggatcccagggacaccaggaagggcatggtgagcacacaccctggagagagggataggcctcaacagaccttgggctcaggcctggcccatcctcaatctcaccctcagaggaacccacacttgtccctgcttttaggggagcatgtcttagcccccttgtccccttcaagcttctcaccatctcctgtcccatggaactcccctaggatgggaaggatgttaggaggggaaggtagagagcgggctgtatttgctgatgagcaccccctctgtgccaggcactgtgtttatgctttatgtgcattttcccattcacccctcatttctcatttaccactttaccagattaccatgattctatccatgttacatatgcagaaagtgaggcttagagagattacccggcctccccaggccattcaggggttgaagccagaatttcaggccaggagtgtcaatctacagaagccagggtcttgctaatatgccaaagtgaggaccaccccacccccagtaagaacctcctgcctgggtccaaggaaggttagcctctgctctcctaagtgctggatgaagatcctttacaaggagccaagagtggacaacagtgagcagtgagcgctgagggcccaggctgctgggccagctgagctctcctggcaggggatggagccaagtgtcattaccagaaggcagagtgtgggtcaggagccggctccttgctcaccattcagagtgccttgagaaggacagctgtagctgactgcactttgtgcaaagagggcctaaagcagcagggcaggacttgaactcaaggctacatgctatcctagatgacacttgggaacttaactgggcccttctctaagatctgagcatggaccaagcgccttagagatctcctcaccagcagattgtcctctagaggagtaagtgggcaccaatcatggctggcaaggtcatgattatggcagtgaagaagaagaaaaagaagaagaaggtgggtggtggcaatgatggcgaccgtgatggcaataatagcagaggcccatgtatccaccagacactgttctaagcactttatgacataataatcctatggagtaggcacaagtattatccccattttatggaagagactgagacatggatggttaagtaatttgtccgagatcacacaaatagtgtattagaggtaacactcaagtttcagagcctgcgcttttcttcacaatgcctatgttatatttacaacacaatgaaaatggcaatcactatttattgagcatttactatgcatcagaaactgtgctaagcactttatttgcgttatctcatttaattttcacaagagctttaacacttggcagtagtatagttccattcacaggatgtaaaatttgaaaccatgagaggtgacataatacgtgtgaggtcacagggccagtaagtgcagaggtgatggtcaaacccaggcacgatgacttcagtctccccatcttaaccactgaggcacagtgcttttctgtggctgtatatgcatgtgcacacacactcttccatgagcccatgtgcacacacacacatgcataccaggatgaacttaacccacacagactcacagcaacatggacaccaaaagctggctgtgtcatcaataagttagggatccaggcctttggtctcaggactccataaagcagttcccaaggtgggaagcaagtctgtgctgcaactatgcaaatcttcgttccccagccagggctctgagcatctggacaaaaactgtgggggtgtgggggtaagaatatttgcactcaggactgaaactccagattcctttcaatgtacattcacagctgtaaatcccacttcccaggagctcctgctgggatttgcacaccaccttccaaggtcttccttccctgccaattaatttcagtgtgaattgaaccagagatcttggccagaggataaaactggttgtacctgtttgacaatctccccagctgccatgcagagtctgggctttcttcctcccaggttgcttctaggagtatttcctaagctcatgcctcttcctgtaagtcctggccatagacactttgatacactcagatccagcccccttacacctcctggggagacaccactgataagcccagccatgcccatcacaatcacagcagccaccacacacaaaacatcatggacaagttctgtctccaaaggtccctcctgaaatcagaaatgagcaagatgttccccaccttaccaagaggcaacgaaggaggctcagagagatgaagtgaccagctccagtctccacagccagaagaggagaagttgggtttaaaactacatctaccatacctacctcacctggttctgcaacctgaatttcttccagacccccattctggctccagtgagcatttaagaggaaagaaaatgtcgtcctttaggagcaatgcaggagaaggtgcatccttccctaaagagggaaggattacaagtgacagagagcttcatggggaatcaactcagacaaacgtgtggaggccattgaattccaggcagcttctggagactggtttggccagagcacaggatgaagagtaaagaatggaggggcaagggctgaagctgcagagccctgaaggccaagctaaaggattggaaatgtgtcctggttaccatagggagcaatcagtggtttctgaggaggaccaggtgccagtatttccaaagaaaattaatatttttttggagacagagtctcactctgtcacccaggctggagtatagtggcgcgatcttggctagctataacctttgcctcctgcattcaagtgattctcctgcctctcagcctcctaagtacctgggattacatgcatgagccaccacactgggctaatttttgtatttttagtaaagacaggattttgtcatgttgaccaggctggtctcaaactcctggcctcaggtgatccacctgcctcagcctcccaaagtgctgggattacaggtatgagccaccatgccaggccaagaaaattaatttaaaggcaatatccctaacaaagcacagatggcttaagaagtggaagcacagctggctaagggggacactcctctcaaagttaaatctccactgaataaaatcccagaagcattttccagcctgttacaaattcaccaacttcagctatcatccaaaccctggcctcagaaaaggagaaagattaacaacatagcctccagattcagacttcccgggtttgaattctagcactggcatttactagctgtgcatccttgggcaagttgcttaacctttctgtgattccatttcctcattcagaaaacagggataattatatccccctaactcactgggttattacgaaggttatgtgagttagtggtaaaacgtttaatagtgccaggcatatggcaagtgtctgtcaaataaggatctttgtgttcacagaccctgatctacctatcaaaatgaaaatagaatgagtatgacatggtgtgttcttaatgatccatttctaggtccttgtgatcaccaattcctctgctacccaaaaacaatcccttggataatatgcctcaaaacatttgggctcacaggtctatcatatgcagaataaacctattacatatcaacaatttcatagggttcagcctaatgcttccacttttttgagagctggagtttttgacccattttagcattctctcttttttatactctctttccccatgtcaacagagaaaggaaggtgagttcccaaaagaacacaagagagccatccttttcagagaccttgagaaaaagaaagatctttgagacatatggtatctacaatctaaatgatatgtaactttcctattatacaaaaaatataaaacccaaggtcactctctgttgaccttgaagaagacagaggctggacaagctaacagccagacaagtatggatccccttcagaagattatgtgagggccagggcaaactcttgcactcagcttctgcccttcaatcttccccaaatcacctgagagtctgacgtcagcatcttggactgccaaagctatagttctgtttttgtttcattgacacaggaagaggctctctaaaagcagaacccagatgaagggtggctgtcaggcttccaggaggacatttttcctgggcaatcagggctgggaaaccaaacatatccgggagcagccacgtcccccttatccccttgtattcctctaaagacctttggctctttacctcgcactggaagggatcagatataaatgtcactaggtccatttcacagctaggtaaatagagtcggggaatctgactctcagacaataaacagaactgaattttgaagcattgctcttttctggggcaaagaccaatgacttgttgattttgcaaacaaggcagtgacatgatccatgtttgaaagaggaccctggtagtcttagaggaatagggtggggactggaggtgagttctaagactctgggaattgaccaagaaggaagtggggggatactccaaactaagatgtggtggtggaaacagacaggaaggtgcttctgagaggggatacaaaaacagatttgtccccaagaaatcagcttgtttctcaaaaactgaaacaaggattcaaggaggttatttgggctggtggtattagcaggcacctggagacacaatctctcccggctctgcttggagacagattcccctgactgtatttacctagctgtgaaatggacctagtgacatttatacctgatcccttccagtgtgaggtaaagagccaaagatctttagaggaatacaaggggagtagggggacatggctgctcccagatacgtttgggctcccagccctgattacccagagaaatatcatccgagaagcctgagagccacccttcatctgggttctgcttttagagagcctcttcctgtgtcaatgaaacagaaagtaggagtttgggaaggctgattttgacttaaggacactgaatacaatcttttctgggtgtttacaaagtgtgtttaccaagcagccactctccaaaccctagcaactgcttaaaacaagagagctgctgatttgtggagtgttttcttttcaaaaaatatcgccgtaaatgttggatttagagacattctttccttttaaaaataacttgtcaaggggacaaaagtatttaagaggctttcttctcagctcagaaagccatagggaggaggaatggtttgttttggagttttttgggtttttttggggggggggattttttattttgcatgaggttagagctaggagtaggagaagtaggaggggcagttggaaagcaggtgggatgttggttagctctttgccttcggaatcccaaaccccttctctgattgctccttccctcacctttttctctcaaaaacccaccaggatctaggagaaaacaagattgagctctactttgccccctccctttccctttccccctcccctgcagtcccaccccagcgctccccacctacctctcatatcaggtgtcaacttcttctttctctccacagacgccacagtgtgtccccaagtgcaccactgatggtatacaagattttggaggttgacatacaaataagctttaaaaaaatttttagcagtacgtattttttagagtaccaaaaaacacagagatagatagacagactataacagatagatagatagatagatatgattgacagatagataatagatatgaatgacagatataggtagataatgatcgacagatgattgatagatatgattgacagagagatgattaatagatgatagatatgaatgacagatagataataggtagataatgattgacagatagatgattgatagatatgattgacagatagattaatgattgactgatagggcgagccaggacctcaaacccatgctttcacagatattacccctttcctttttaagcacattttacacaacacatgatcattcaaccaattattgggttgttatggtcctactaagtgccaggcaccatttatcgttcttaggaacatcagtaaacaaaacagtcaccagacactgatctcacagagcttatatgctggcaggcaaaagcaggaaataagcaagaagtgaataataatctgataaattctaaagtgattagtgctataagaaaagaaataaagaaaaaaacaagaaaagaaatattaaagaaaaataaggcatgtcagcagtgcccagggagggggaagggggtaggttcccaaatttaatggggtagtcaaaataagcctcatgaaggaggtgagatttcagcaagaacttgaaggaggtgagtaagttcactacaggtttatctgggggaagagtggttcaggcagagggaagagcttcagcaaattccctaagcaagggccataaccagcctcttccagaaacagtaaggtggccagtgtggctggaacagagtgagcaaggcaagaaagtagagggagagaaaatcagaggagacagattctgattctgatcacttattttaaatgtaattaaaactaaatgaaatttaaaattcagattctcagctgcatgagccatgtttcaagggtttaatagccacttgtggctagtggctaccttattgggtagcacagataagaaaatttctctcatcacagaaagttctatcagatgacactgaccttgagtgttttggctccttttttggcttggttaacttttattcagactttaacagctcaaacatcacttcctccaggaaggcttttctgaccactcttcctgtacatcagctccactgtcctatgcatgctctcagagagccaggtggctttccttcgtatcagttatctctttgtgaaatcgtacactaattggcagtgcttgatggcttgtacctgaagtcccagctactcaggagactgaagtgggaggatcacttgagttcaggagcttgaggctacagtgaactatggtcactgcactccagcctggatgacagagtgagactccattgaaggaggaggaggaggagaagaagaaggaagaaattgtatgctcattagtacaatatcttactgatgtctctctctcctaatacattttaaactccgttgtttctgttttggttcattgttatattgccagcacctagcacagggcctgacgtatgaaggacaaataatttgttcaacgatccaatgaatggttttaggtggtaggactagaagcagggtattcactaaaaaaaaggttatagcactgtggagaactgtgattcagtaggctcctgggacccaaaattttgctgggtgagagcagctccagaggctggagtccctactgcaccaaacttggattcagctcaggacccttaatcatttttgcacccccttctcaccaaggcccccacatgctgtccctccaggataacaacagcatagcatctgtctttaccagagaagccaagtctcagatattcacataatgtctcttcattccttcagtcctgtgcttgcagcagcagcagcggcagcattgaaatgcttccttctgctgctcgcgaatccgaggagtggggaccgaccttggcacatttgctgggatgcctggctaggcaaggagagtgccgtgtgctccagcacgtatgtggccgccctcatggagcaaatgctggactgcacagccctggatctgacaggtaacacgcagcagctgcatgatttaaaaggccttgtgggaagaggttttgtctcccactttgagagcttgagtgcttcatataaatatttatgggagtctggggcctccattaaccctaccagtaccacatttcacttgttacatggtgcttgtctgtgaatgaatgtgaacacccgtgttcagttatacatgcatgtatgcatgtgcgtgtgaggatgtacatggactcctatgcattttgggagagcatgtgtaatcaattgtatctcaatgtgagtataaatacatacacttatgtgcacataattgtgaacattgtatccacactgtaaatgcatgtgcatgaatatttagacatgcatgcatataggcatggatacatacatatgcatacatgtataatgtatgtgtatatgtttgtgtgcatgtatgtgggcacatgaatatgagagtttgtatctagcaaatgagcacatgtggattctgtgctccaatgtgtatgcaggcctgcctccatatgtgtaagcctgagtgtatacacatgcatgtttattcatgcacctgctctgagaacatatgcatatctatgtgcaggtctagagcttcaacattaccccagaaatagctttcattaaactatgggcgattccataaaaattgcctcgcctagaggctgctgcttctataaacacttgttctggtaattatgatatatttactggtaagttcaattgagaacagatgaaaggtgaaagaactaactgttcattaattgcaaacagtaccaatgtcccaagacaatgatgcccaaagtgtcctcctccaccacacacagacacacagacacagacacacacacacacatacacacacttcccaccaccatactcctctgccagagattgaaatgagcaacaaagctgcagtttctctctgacacccttgtcatcatgtttgtacttgtgcatctccaaattcccatcacccatctctttgcctggggatgcaaagagagcatcttatggctggagaacatgaagcacacccttgtaaatgtaactaccctctgcagagggatttagagaggaaactgtcatcaaagatgactatgtcccactcctccatacttccccccacccgagtgtttcagataaggcatagtggacttacgaagtttggtgacaaaaatacaaatttcagcaccagataggtggggactcaagttctagttcctccacagggtgacactgagcaaatagtaaccactctgggctttactcatctctgacctgcagataatagtaacccatgcttcatagagttaagtgaaatgtaataatgaaactaatctcacagtttggttacacttctgctttgtgaccttcctgcccattgtccacagaaagggacatttgtgccatgctctggctcccagaacacaaaggaggatgggtgtcaagccctgcaatgggaagcacatcccttctctgtccactcaggacaggcagaagtgagcccccaggccagtccaggtccatgatctctctagagtaaagctcaggtacctgtaacaccagcagaagcagggaagtgaaggtgccagatccagagaagaaacaaagggacaccaagagtgagctaagggcagctgtggctcctgaatccgatggagtcctgggctatgatcaatgtctgcctcatgctccaaagctctgaaatgggcaccttgtagtctcccaccctgctgtccatttactgcaaggagtccaagcctaggtaagatatacagatctccaaaaaagaaaacacaacaatataaatgttggacttgtggatttcatctcccttcttatgctgaaactggcttcttccagaaagtaccagggctcctcccattgcctccaaagctgtccctccagcccaaagacaacatccctttttgatacaaatacgaaagaatgtgtaatgagtggctggtatatttcatgaaagtaacttcacatgaaagaatgcagagaggcagctaaaactgagtttggcttcataacaaatcattaatataggtgattttccacattgaagtagtaacttatttcatgtattctatttcttccaagtgagaacactgagctctgattttcttatctaaatgcatcttttaggaggcattctgggataatgtatataatgcatcttttattatcctaaaagataggataatataagatgcatcttttagtatgcatcttttaggataatatgtgtaagacaacggagaaagacattaagaagactaagtgtgaggcacaggaaattgacagaacgtggtaacggtgttcagaaatgaaggaggcatacggaggatgcggaggagatacggaatatgtgctccccagttggaagaggtgctctccatggtctggacacatgctccaagaggcaggaactatagaaagaataaaatttcagcagtagtagctgccgccttcgccaaaataaggctaggcttctaggccgggaacgcccagcctgggaagccgagtaagggctacttccacggaccaggtactccctggacgcagaactgtcccttcactgcagctggattgtcttctgagtgtactgggctaggcaacagcacagagcagctttaccaaccagattgatttcttttaggagggctgctggaaaccatgctgcctaatggatgtgccatttgaggacttttattttgttgggggggaggaagagcagagcaaacctctaatcttctcttccttacataacaaatccaaacacaactatctctgggatgggaggccaggccagcagactgcaggctgcagagggaagggttacgcaagaagccagttcagagttttcctttctgaaaacagaagggcctggagtgcagattttgcacctgaaagcctgcaagggaatgaccagaaactctaaacccactgtctccagaagccaggacaggaagagcttggggagtggggatgagagagcaagagagtagggggtttgcctggtgtggcagaagctgcaactccaggtcacagagaaagccaagtgaccagcctggtggatctggcgtggttcctggcagctcccactgcagtatgggtccaagaggcctctgggcgggcacaggctgaagcagtgggtaggagtcgagtgccctctgacaggcaggggcgttgtcctgccacagaaatgcccagagacccgggactgagggaagcctgcctggttcactgaaagagggatctgggtccagggcccaggctcagcttccccggagatcccttcccggagaaccgactggtgccggttcccccgcagcggggcgccgatccccagcgaacctcgccactgggggaacctggaagggaaaagcgggatagttggagcggtcaagacgagagcccggagcagcgggccctggtcctagtgctgcgcggtggctcgggggactccagagtctcattcccccgcgccgcacactccagccacctcgggaccccgctcggcagcccttccccgccaggcagcgccgagataaaaaacagaagagaaatcaaaacagaaggagaaagttttctgaaatgaaagaggttacgaaggaagggctaaaagaatgggaaatgtcaaagaaagaaaaaggatgccaggaggcaagggaatggtgcctaggctcccacccgtccccgcgcacaaggacccgaggctcccggcaagcccagctgagcgccttccccgacccgcctctctgaaagtggcggcggcggatccagtccgcacagcctcccgcacaccccccagagatccggggtcgcaagaggcgggattcgcgccggactagactgcagctgctccagccacgggcgcggtccgaagggaagccctcgtccgggggcctgctgtgccccgtgcgtgcgtccgggtgtctgagcgtgcctgtctctgagtgcgtctccgggtgcaggcgccagcctgtctacgtgggacgggtgctgacttggaagactcccggccctggaggattttcccccggggatgtgaaggattgcaaggagcccgcgagccgcagggagcggtgggaacggaaaaggaggatgacggtggcggggtgctgctagggtgggacgtgcccgagggccttgggactcggttctcttttcctgggcttgtgggctctggggcatcacggcgggtcgggacgacaggctacaggcggagacgcagccggggcttgcctgatgtgcgagtccgccctggaggctccggaagcccgggcctcctccaaggagctgccggttccgcctgactctcgcctgcttgcgccccgggccggttagtgctcacttggagggttgatgcggggactgacagtgcctcaatgtcagtccccgcaccatcaatgtgggtatcaatgagggcatcaatgtgtgcaggatgtgtctgtgtatctgtgtgtcagtgtatcactaagactgtgttctgggattgtcagattctccgagaggcagctggtcactccaaaccggcttgaaccactttgtcttctggatgcaatgttgatggtattggtcactgggtcgatgtctgtgcttctgtgctctggggaagaaaagccaacactttggagtttgcaaccctccccagctcagaggctaaggatggagaatgtcagtccgcttgggacgattccaaagggagtcaggccgccggatttagggtctccaccagccaggagttcgtgatctttttggtctctggagccatgcagtgggatttcctctggcaccctacctgagcgaagcctctttcaccacaaagaggatacatgtgtacatgtgaaaacattctgtgcaggagcatgtgtgtatgcagttacccaactaatcaaagccccttgctccttcattcatgcacatggggacaaaggttccacagagccaggctcagctgccctctcctcccagatcacagccaaagccttccccaccggacacatctttcatctttctgccagtgaaatcaactgggcctaggaattaaattcgagctagaattccaagcttctctcctattgaacaacaccaacacactatataaatgtacatgaatgttaatgttatctgtatcccaaatttttaggtccccttcctcttctctagacctcagccatcactacctccaggcttccagggatccaggccaaaattccctgttagtttcactctccttttccttctcccagctcagattcccagctggggctccacttcatgggtctcctacacctccccatttgggttctgaaactccatgagccagagaaccccaggaactaaacgctaagcctcctggactgcagataatgagtctaaggagaccggagcccctcggagctagccattgccaaaggatcacaaaaactctacaggggttggagatcctactccatgtcccaggggtgtctgaggccaaccctgagttatagacaggactccaaggaggctgagaggggttgggggtgacctaggtgggcaccactcttccaagaatacggaaaaggaaaggttctagggccacctcccagtcagggatctccaggctgcagccaaagctgctgcactggagtgatgacccaaacccctccaacacccaattcaaggagccactaaaattcagactcggccacacagtgcccatctgcagaactgaggaatccatgcctcagcgccagtgcacccgaggcatactaccgtcaaaaacacaagtccacacagagaggtgtcctgcctggagggttttgcaccccaagatccagtgctgggttgtacctgcttctatcagctttggggtgagggagacaggccccattcagagaaggtatctggctctgggcagctccagttgctcccagagagatgtgctgggtaggagaaaggagacttgcaccccaggcaggaaggcaaaggcccgggtcagctgggccagagcgccaaaaagacccagcttccccatcaaggtggcagctcttggcttcctagtctccatcaatcactatttcagagcagacagactagcaagtcagttctggtggccaagcctgaaagcactgaaaaagtggcgtgtgccccacacccagggactccaaggctgtttggacctgcgccctctcagctcataatccagctctcttgaccagggtctgtacctagggtgggaagcagagaacacatttgaggctcatgtacacacacactcagacactcaaggaagggatttgctagggcttggtttgctattccattggccatggggtgagagtaacccaaagttgatgcgactcttgaggaagcaagagaagaaagtcaaaatcatgcgaacgcagagtcctctaaataaacaccatttccatggttttaataagcaaaataggaaaccattttaataaccaaaaaacagaaaccagtctgaataaaactacaatagactaggttttaatattttcatatcataagcagggtttgaaattgatcccttattttacatgaaataaaaacaatttctgttgcggcaggtttgatttcaacacagttgaatctgtaaaaaccaaagctcgtttctgatgcaggacaaatatccacaatatttaaaactgcaagcaccatgcggttcatacaatcttgttattactgttaatttatcaactaatacaaactcaaaaatgcatccggccagcagcgccagcaatttcaaatgggaacttaaaaatacacttttattttggtatttttgtcagtgcaacttaaatccttttactgacctgcagaaaaaaaaaagtaataataaagaaaaacacccatatcttccctataactactatacaactgaagaattgaaggggggggacaccaccaagaactcttcctactatctcaaaagcagggaaagaaacgcaatgcattggtctaaagaacgcacttgaaagttgcaaaattacttgccaatgtttgggtttctggtacattctgagcatagcagttggttcagtgcagtgtctgcttaccagtgcactgccagggtcagggatggctaagcctctcaccctaggagcgctgtggctcctacaattagcgcaggcccagagggttcagaagggacctcagggtgattctggttacaataaaaagcagaggggaggatctgttttcctttcctttcctttcttattaagggtatcaatttgaccataagacaaggctgtagtccagaacactcctctggggtgcggagcttggcagcttccctgccctgccctgcccttgtactgggacctctcggttctctctctcagcaccaacaaggttgaaaactaaagcgagagaggaaaaagaggaccgaatggggataagggaaggaaagaaaacatgcaacttccaagtgtgccccaagacaaagttgttttctgatgcaaaatgcccggaactttttctttttttttttctttttaacttacaaacaaaaataccgtaataataaacccaaacaaagaccctcagcttgctgccacgttctctatgcggtttggcggggcgggtatttacaagcctacagctgggactgaaaccccgcacgcagccgccggagtttccaaactgcgatcccttctcacccaaagaaacaaggggagtatgatccatgatcaacaacatgctaaagttaaacaagaaaatggtacaaaatagaaattattaccatacatgtccagcatgcaggattaatatttttaatgcagattttttgtatttttctatataatcgagcaggcaataaaactgatgagatttgggcgccgagcgtcctaactgaggcctgtgtctcagggctgagagccagtgttctccgaactctgacagacaggtccgtctgtccttccttctttcgctcagcctcgcctctcgcctgccgggacgccagagtccctctcctttcctcgttgctctcttcctggcgcggactactctccgggcagcaaagcagctgtcccggcttaacgcgcaaagttcagaaagccaggagtctccagatggccttggtgacttctcgggactatgcctcgccgcccttcagcctggagagaagttactccgggacctcccaccctctcgtctctctctccggctctgctcgagtctaggaggcggcgctggcgtgcgctactctcgccttagccaaggtcccctgcccgcccgcgcacccgcccgtcgcccgcggcccgcgcgcccttcctccctctcgctcaagtcaaacaggtcaaggctggggccgcggcagggacagggtccggggtagtctgggactagggacgtgggacagggagtccgggccggggcaagggcgggggccaggaccggccacgactcacagaaagaactcgggagaggaggggctgtcgctggtggagcccgcctccctgaagccggagttggcgagtttctcgcacttgaccttgtaggcgtctctctcgcgggccagccgggacacctcctgcttaagctgctccacctgctgaatgagctgcgtcttctcattctccaggtggtgcttctgctggacgcgtttatacctgcaagactgggcgtagccccggttcttcagggtccgccgcttctgcttcaggcggatcacctcgtccttggtgaagccccgcaggtggcggttcagctcgcgcacggacatggacacgagctggtcgtcggagaagcggtcctccacgctgccgttgccgcccgccgccgtcgccgaggccgtcgcgtgcggcccgggcccggggtggctagtgggcagctgttgcgccgggctagcggcgctggacggcggcggcgacgcttggtgatgatggtgatggtgcgggtgagcgtgcgggcccagctcgtcgtgggccacgccggcgcccgggtacgcgtggtgcgggtgagggtggtggtgatggtggtggtggtgagcgccgcgaaagctgtcgaagctttgcagcggctgtggcactgggtgcgagccgatgagcgcttccaccgcgtcctcgggcgtcaggttgagcgcctcggggttcatctgctggtagttgctcgccatccagtacagatcctcgaggtgtgtcttctgttcggtcgggctgaagctgggcgacgagggcacggagctacacggagtgctgagcggtgtggaggacaccgagccggctggctgcaggcgtgtgcagggcctgcccggacgctccgcgcgccccagtggctccttcttcacgtcgaacttgagcaggtcgaagtcgttgacatactccatggccagcgggctggtgggcagctctggccccatgctcagctccgcggccatcgctgaagcgaggcgcagccgccgctgccgcccgggaaactttgcggccggccggagcgcgccgagccaagcgcgggggggaagagcggagaagagctggggaggcggggagcgagggcgcagcgggccggggccgccggccaagcctttgtctggggacgcggcggcgcgccggagagtcccgaggctgcctgcaccgccccagagctctgggctgtgcccgcgcagggaccgggccgggtagagtcgggcggggtggagaggcaagcggagcgcgcggtggggctgaggggaggcgtggggcgagtgcccgttgctcgctctctagctctcttgctcttacgctctctcgctcgcagccgctcgcagctcggcggtgcagctgtgctggatccggcggcgccgcagccttttatcgcctcctgatgtcactggggtgcgggggcccgggcggcccggtgcgcgggccaatagctgcacggcctccgcggcccagcggcgcagggcggggcgcgcctgacagctcccccgccccccgcgtcagctgactggcggcccgagcggccccggagcggcggaggcctggcggagcgctggagcggagtgggacggccagcctgggcccacccccgtaccctgcaggtcccggcccacgcacgctcgcctggagtgcgcgccccacctctaggccaaatcaccgctttcccctcctcgcgcactctcctccctcagttccctttgcaccccacccccatcccgtgtcacccccaaggaggctcagaatgagcgccgggacaacgcctcctgggccctttgttcccaagcggcccccgcccagtgggcgacgctctgtgtgtcctcgcggcttctggccgtgtgtgtcgtgcgttcctgtttctggagatctgcgcgtatttgtatgttggggagggcgggctcgaggctccgagagttgtgttcagacccaactcttaacctcaggggacctttctcaggccaagcgagggcccctcctggcgggtgcagtcgcagagccctgaggttcgactccactggccccgccgctccccgcgttcaccccaccgcacaatgttcacagtgaaggcgacgggaaaagcagcagcccaaaggctctgaattcctcttccccgccacacgcacggaatcctgagcccccggagcctcggggccgaggccggcccgggacggtgctccgagtagctctccactgctggggagccggccctgtttttgtttgaacgttttgtaacgattaagcagatcccggcgtcagcccgccgcggagaggctcaaacaggcataaagtgcgaccccaagtggccactgtgcgcaaaggcgccgcgaccgcccggcccacggccggaaggcttggacggcgcctcgtacccagccaggtctcccctacctggcccaacccaagccagcccagaacgcatactatgtgtgcaccagagcccaggacaggttcccctcgagcgatgtacaggtcctcgggtcccgtcttcgtactcagccgcgagcctcgagccgcgagctccgctctggtcgccccgttgaaattccgtgccccagcgttcgggggtgcccgtcggctgctccctgggccggaaggtcctgggcggaggaaggccggtagccaaaagtggaagcgccacagtgaagcggcccagggccaccgggtgagaaacctccccggagggcagacggggagaccgaagcacaccgcactaggcatccagactgggcttgggagccgcgcaccctccctacccagatccaggatggctagaattaacgggttctttctgagacctcggctcaggcgccgaaaccggatagatcgcgaattcgctggacccggagacccgacccgcctcccgcgtcaccttcttctttctagctttgggcgcgcgcagcgaaaggcaggagaggcgcgcactgggtgagtgagtcccggccgctgtctgcgctggaccagcccgactgacctcgcgcgtaggggtcgcgtgagccacaccggtgcagacgcgcctagattatttttaaatgttagaaggtaaaatatttgcctccaattaatctgaaaactctctattctcttgcgccctcggagaggctggggtacggcgtggtattgggccgcctatttttaataaaatgagtgtattttaactaaaacttaactcaatcttgtggggtggcaaattaaatgctggaagagcgcgtctacaaccctcttcgagaagcgtgctctccgcagaaatgagtcggccgcctggagagagagcctgggcggtgccgctgcgcagcccctgccagtagctgggggttggggactcgcaccttgtaaatgtcctcgtcttgtttgaacgcagtgagagcacactcgtttccagatcactcgggaccgggtgtctcggatctgtgcagactatgtatggctccggcctcaggcggccagggcgggacaagcacgcctgactctcttggtcccgactggactagagctggtagcaccctccctcagggtcctaagagacctgtggctcccagagtgtttctgccactgtggacttctgcgcgggcaccaagatggacaggccaagctgtgacccactccacccccgcccatacgtcccctcggctctgcctgacactggccgtcgaagacttccgtggcccattaaggccctggggattcctgaggccccaggtctgcggttccgaacctcctcttctcctgcgggcggcctgcctccgactcagggtctcttggactcgggctttgggcaaccgcgctcttctttgtccctgtgcctctgtctctgttgtggtcactcccttcgcctgggctttgactgtggtatctctgtccatccccaggctcacttccccacccaaatccgtttctctgcccctctcccagcttagccactccctcctctgcacaccccacaacctaccccaccaaaaaaaaatgttggaaacagccctacccctgccaggctgtgggtgaatgacggagacatgcaggtggccgaggagttaaggccgctgctgcgcagccggccccacttcgtggcctggcctcccccaccccggttactgctgcgctgacttggagccccaggccctatagcctccaacttccgactgctgtcgcgggatgccgcttctcatctctggggtctctggatcagcatgccaggctcggctccccgtcatggatacacagcagtgcccgcagtcttcaccctatccctaaaacgtaggcagggttgaggtgaggagggtgagggattgctgctgtatacctattgactgggagtccgacacgctcaaagaaaaaaagtaaaagaaggaacggtggaagaagtgaagggtcgaggagaagtaaagggaggccaggagacacgcgagcagtgcacggagtcccaaggcacactgaaggaaatgcacggagtcccaaggcacactgaaggaaagtcggggattttgcggcagccacagcccctctagtgaacagcttgttgccaaaactcccatttaaggtgtttacccaagagtgacctcctctctacccacgccaggttgggccagaggctatgcctctgggacgcaccgcctcgggattctttagctacaaatggtgatggaggaagctctgcagggtccgagccgctgcagagccttggagcattcggggtaggagtaagagaagaggttattccctaagggagcgtggagcccacagccagccgccaggtgtgaggtttgccgcgctgccctcgttggcccccactcagccgagggaataactccagagaggcccggcggcgtgtcctcccgtacgcctggaaaccagagcggcattcctggcatcctcattcagcccgaaggtgcgccgttcaccttcggcgttatttccctgagggttgcaggtggttggtgagcgaggaggcgtctctgtgcacgcatgggtgctgttggaggcgtgcgggaggggtgtgttcgtgcgtgtgctgtttgcgcgcgcgtgtgtgttggtggagaggcgcagcagcacgcgggatgcgggagcgggaaacttccagcttcaaagctcggtgggctccggatcgtactatgcggagtcgctaagcagaggccagtggtctcaagggcctcagaggcaagttctgccagggagggtcctgaatcaggggacccccacctcccgcctgccgcaggagcttgacttctgcctttgcatcacccagatgtagtgtcacctgtcttttccaaggagccctcaggtctctgccaccttttgtgaggctcagtggaaaagtattatgttgctcccattccgtgggatcctcccaaggtctatggaacccaaaaagagacaggagggttttctgggggatttttgtttctgttttttgcccttactcttccttttcctcttcccaaaggcagctatcacttccactttcccttgccccatacaaccgctgtcagattccaacccagtgcttctaaaaaggtattcttgggtttctgggtcctggtggtctttaggcaaccaaaagattcagagggtcccagtagggagccagagttacactgactgtgaagatcctggctgtctctcctggggaccagggacaacaccccaatacatgcagaaatgtgcacgcgagcacacacacacacttaggggtaggaaattattattaaaactatttcactgtttttttttactgtgttctaatgtgaccaataaataattttaaattacacatgtgcctcacattctatttctgatggacaagcctgcattagataaccactgggcagtattgcttccaacacagatgggatatttgataatagtcactctcatttgtacagggagttgcaaagccttttgtcattcacctttttgttttgttgtttttgttgttgttgttggtttgttttattttattttttgagatggagtctcactctgttgcccaggctggagcctggagtgcagtggcgtaatctcggctcactgcaacctccacctcctgggttcaatcgattctcctgcctcagcctcccaagtagctgagattaaaggcacacaccaccacattcagctaatttttgtatttttagtagagacggggtttcaccatgttggccaggctggtctccaactcctgacctcagatggtccgcccacctcagcctccatcattcaccttttcactcaactcttacaactctgtgaagtagtaactattattatccctattttacagagataggtaagcagggagataagtgggtggatgcagatatatcacagtgtcttaagagcattttgcatttaaactcattcagtcctcacaactgccctatgagatgagtaggattatctccatctcacacaaagaatgaggctcgagaggctaaatgatttctttacagttatacagcagtgatgagctggaacttctggtcccaagtccagtgctctgaatactatgaagcgtgtggtctctgtgtcaactgaatagcatcctggggattctggtgtcagtacggtgcttctccacctgttctctgggtcaggattttcagctgccacaggattagtgactgttcagttcacagctgaacctttaccaagtgtcaagtccctgccaataatttgattatgaggacagtgtttaatgtgccttcttatcagtggcagtcaaacttctcttttcccttttctcttccctgactgtgtggggctggagagaaaccaaggcaggggtaccggccaaaggagaacaattttgcagagtcctctcatcctgtcctttacccttggcatcagcctggcctctgatcctgggtcctgcctctggtctgagtttgaccttcagtccatattcatacatccctaaatatcaaaggaaagagacagagaaaaagagaggggagagatgattcagtgctgatgagaagctcactgctactcaaagccactgtgcagtgaatgataaccaggacagttcccttcccactacacctcccccacccatgaccccagagccagtgtcaggaattctgaaacctcattattgctccccagggctgaggccctcacctcccatagtctaactatcgcctctctatccttccaccagagagatccaccagatctctctggttcttcatctggtaccttaaccttcatccggtaccttaaccttcatccaagccacccttatcttttccttagaggattgcagaggctttggctgtagactttctgcttctccacagggcagtagagatagtttttatatgaatctgataattccccctctcccaccccctggcttaaatacaaatcactttaacacttggaaaaagaaccaaattccttggcatagccttcaggccatggatggtctacccttgttaccctctcccacctcatcttgctgcatcccccatcacaatgctccaggcacactgatttatttaagttcttccacagcccaagctgtgttctgccacaggacctttgcatatgccattcccctgcttacaatgagtcaatctcttgtttctgaggaacttagaagacatgttttatggatcttcccaggccttggagggacttgggtgtacctaggcatgggagtggggtgaaaagcctattagcaaggacaaggtcctggtcattctagggaaatcctacacactggagtcatagggcaaagcttgtacctccatcccatctttcttcaacctggatcagggtagacctcaggtttgggagaagccttaggaaataacacagggacattcaaggaaatgatatagtcagctagtccaaatgttttacacttgagaaaatgggttacaaacacaaattcgtgagccacagtctgattttataggtctgagtagagcccaagaatttgcattttaataagttctctgggtaattctgatgcctggagttcaagaaacacactctgagaaactagatggaatttgatcatgagctccagaggaagtctccaggaggtggagttgtctctgtgtcctcagtagtcagtgcaatgcccataccaggaggaactcaattacaagtgtggaataaatgaatgaataaatgaaattaataactaggcaaaggctgatcttccttacagtgtgaggtctgtgaattgtcaggccttttctgcacaccctccagccccctcctctccctgagttagcagtcattcctgaaccaatccttccttcttcctcctgatgccaaggactaactcaagaaatctgcatgatttgagttatcccaccccatgggcctccctgctttcgctttcttcctcctttgtctggatgctcttcaagggcccagaattccagcttctcactacatgctcatcaccacatggagagcaaacttctcaggtacaggggaagtagatggcaccctcccactgccctgggacctgctgcgtgggagtggtggaggaaataatgctgattggctgtgtcaaagcccagtctccattcagccaggagctgctgtggtcattcaatctctttttaaaacaaattacagaagatcacattctcattgtgaaaaaatgcagcaatgtaattttaacatctatgtctagagctacagcttgcttttgatttttactcagcaaatgcttggtcaatacatggaaatctacttctttttaactaatgcatagcattctatccaatggatgccctatagttttttatccaggccatattgaccgacatttaagcaatttcaaatcttttactattgcaaacaatgctgcaactcagctttttacatgcgcctttctgcacatgggcaaacattcctctagaaagcaagaaataaaattgctgggttgaaagatgtgtgcattttcagtgttaataatgtcaaattagcctctaacaagatggtgcctatttcatttactatcagaaatggaaaatctgtttccccatagccacaccaacaatgaatttcatcaaggttttccatttttgtttcagttttacaaccagtgctgggagatgagggttcagggatgaatatggcttccttcctctcctccaagacagtgcaaaccttgccattgtgacatgaaaggtgttgtgatggcaatatgtccacagtgcttctggatcccaagtaaaagatccctggttctattggaagaaatggggagggtggcagaaaatgctgcagagaaaaggtgacacttggttaaggctttggaggctgagcagaaacttgccaaacacagaaatgcaggaattgctggtggtaggactagtccaagcaaaggcatggagcaaaggtactgcctcgtgcccttggggagctatttcagggaggctggaaacagagatgaaagcttctgcaggagccaacactcgaaggaccttgaatgccatgtcaaagggtcagagttctgtcctgagggctagaaggtcatctccacatgggaaggcatcttttttattggactgtcaggcacatagtgggtgctcggtaaacatgtatggaaataaaaaggagaatttcaaaggtatttaagcaacatgcttaattatctaattatctttcatccctcatggagagagacaaggtgcattccatgccagggactgagatccaggcttcattctggacactggagaggtggcacagacacactcagctcaggaattctttcctgggttgcagcccccctcctggccctgtgccaggtccctttcacctctgcccgttagagattgcttttggttgctgtgttgacaacccctgtttctgtgttcggagcggctgttcagtgccatttcctgatttaatatcagcgccagcatacagcaaggatgcacagttagcagtttttgctccaagtatttttcaagttcccttttgatgtaagggttgggtttgcagcttccctgatcacacagagcagggagggagagactgggggaaggaactgggagccagaggtgggagaagacgaccctgagaagattcatctagtccagctgagctgagagactccaagctccttctgcaaggggatggcagagggatcagctaagacacggcaggctgaagggtttcctggaaggtgtggcctctgaagcaaggctgctgttacccttctgtgtgggcataaagatgtacacgtgtctgtgaatatatgtctctgtcacaaaaacaaagggttaaaaaggttaaatgatctaacattatgcaattcaaagcacgaggaaatgaaaacaaaattggtccaaagcaaaacttaaggttggtacaggtcccagtagtgctcagtttttcagggtttggggttgtttgtttgtttgtttgtttgtttttgactgagcatctactatgcccaaggacttcctcagggctgagtgctcatcctcttctgatggaaacagatctttttcactacattatggccaatgcaacaagagagcatgctcggggactgtgcacactcaggaacacacacccacatttgagggcaggacacaaaaagagactgggcacttcttcaccagagtccttgaaggcctgcacccccccacctatagacacctctgtgacctgctgctggggctccattctacctcttctaccacccacctgttggactcttctccaagaccttctatgtcatttggggtcttctgagaagcagaagccaaaacaggattctatgtgtaagagattgattgggggacacacctgtgaagtataaaggaaaaaagggcaagaggaggcagggagagccttcagaccgtgatgttggtcttgcccctgtgaaaggagagggggaaggaaggaggatgtggaaggaagagtcttagactgcagcactgctctaggaaagttgcaaccaggatcatgccacccagtcatggcagacttccccaggtaatgaaattagccaagcaaacatcttcttgtgtgttttctacatgtgagggactggattatatttagattgcatcatctcacttagtccttcacaataaccttaacagacaggtactatcttcattattaccccattttgtaggctgaggcttaaataaattaagtcccttgccagagggcacaagttacaagtgacagaggaaagattcaaaggctgtttgactctaactattgctctggactgctgtggccaggaggaggcttggaaagggtaagtgggaggctcatttctctctttgcacccatctctcctgcttatgggccctgggatgtgtttcagcacaacccccaacaaggcttttctggtctcatcagggctgatgccagctcattccaggctggtctgccagtcagccccaagcagatggcccagaatgctcacctgaaataggcactttccagcagccacacatgtgcttttctcttgggcattacctcctccaggaagccttcctgctggctggcgcatgttttcatagcaccttatatagacactttgcccagagcatctgttatatctgtgtccaccaccaaactcagcctctctaggaccaaaaccaggtctgagtcatgtcagcacccagcactggagggcatagcactggagagacagcaatacatgcacctggtgcttggacaaaggaacgtgtcccaggggcatcaagaagacacccttagagagcatgggttgttgtcaggaaagccattgctttagccttcagatgtgtagcctgcactccctggcttggttgccaggggactcactaacccccaggcagtgttaacaattgagcttctcgcttctctgcagcagataacacctcccacccttgcctcaacttctcttgggggccaggcccaggcttatacccttgcttcccaaagcctcagcatctgcttggctgccagtggcacagtgggtagccccagccaaggaggagagttatttttatttatttcttcttaatcatgaacttaatttagctgctaatcaggttaccatggtgacttgcactggatttatagcagtttcctaaagtgcctttttcacactcttttggtaaatgaataaaatttgggtgatgcacaaagcgcataaatattgggtgtcctagaaaaaggtcagatgcatccgttttgtatttgccttttgccctgactaatcaggcacaagagagccatgactatgaaaagattccaggttcctctcctctgccctccctttaaaaccttcaatggatccctactgccaccaggtaaagtctgagattttttcagtgctttcaaggcctgcccctctatcctcccttcactaacactctaccttccagttctcctgtgctgtttcttgcaagcttttgcctctctgcttttgtttgtgctgtgccctgatctggaaagcccttcccggacagcaggaaagccctcagtcttctgagctctccagaagggttaattcctctctcctctgttctgggaatgatggtagcctggcttgtctgagaaaggttttcccccttgtcttgagaccactcccatccctatgtgctattttagaaaacctttgagcactcttactgtctccactattgcttggacaggggtggggggctatagtgctggccagcccaggagagtggggcagggaagcagcaaggagatgaaatgagcagttggcattttgacagctttccgtatttcactctgtgggaacctcacctcgtattctaccccagtgtttgggaagagagggatcatcccgtgggctcagaagaacttctgccttaggccttctgcaagctccccccacaccccttgtggctcccagaagggagagtgtctccaagctggagaccatagtttccaggtttcccttgaggaccttggggccggctgccaatcagtcttgggatcagccacaatccattagcgaatgctcagggctcaaggcgccaacagagccaccaggcgtcggcgccagatcctactcagggaacccaaagccaccttcaattattgtcttggactttgtaatcagacaagctgggcccacagaccataggctgttttcctaggctcagaaacccctccagccccagttctggcaccctgagctcaccaggtactctccaggccaggatgtacatgcaacccaacgagagaccactctctgaacctcctgggtcacaaaaggaaccacctgactcctttgcagcagcccacgctgtaggtaaagctatgtgagtacattaaattacctacccctctcttagcctcactttcccatctggaaggtacagctgtagttatggcagatgcactggcatcagtgatcatggacttactttacttctggccttctaaacttggagtcagaagaactgagttcgaattcttgctctgcacctttatttgattttgcttcaagattgaagccaggggagaggaaagggctgtttccagaatgcctttggaagcatgagatcagtaggcccagacatctacaatagtgaccaagaagggaacgtcttgtgatatgccaggcaagccctgaatggctgcacaatctcagcaggcaggtttgtccctttgtaccaccagaggagttctggccaaaatgactcagaggatctgggaatggggagtagacatacaactccctctaaccaagcatggaaggacccaggtatccagacccaatcacccaaggcttgagagagtctggggttctaaccctagctcagtggcaaacttactgtgtgatcttgggcaagtcacttaacttcactgggcttcagagagtttttctggagacatgaatccttcccaaatgagggtgagaccttatgttccccaaacccttctccagcatgtgagcttatgaagctggctctggcccatccaacagcagttgggggtgggggacaatatgactttgtaagaaaactcagaataaagcacagtaacccctccagccactggggactgccttactccacccctgcacatatcttaaggtgagaattaacaggtactcattcctgggaaggacttgacaagcatcttgcatggagaaaaaccgggagctcctcattgacttggtagatgttacacagcactgtgtttaagagcacaggctctggagcctgactccctgggttcaaatcccagctctgtcatttactacctatatggccttgtgcaagttgcctaacccttctgtctgctcttcttcacgtgtacaatgggactaatagtagcatttacctcattggattgttgggaggattaagtgagtagatacacattaagcacttagtgttgagggttgatgattatgtatcaaacatttctcccatgtattagttctcaaagctactattattagccccatcttacactcaagaaaactgaaatgcaaagaaattaaccctcttacctggtccctatgctctctgctagtgcatttgccatcagaccttgctgctcccacttctgctcaatatgatcaatgttctccactgacttgttttgcaaaacaatttcatatagcaatggaaatagagaagggagttgggagttaattagggcagggtgagccacagatcaattttaacactgttaaaggagagacaacttgacattagcaggtgatacaacaagaaccatcacaacaccatctacaaaggcttctagccaaaaatcgaatacgactctgatcaggcctctggatcaaactactgatttccaggaaacacaggggatggaggaacacgttaaacaacaccacaaggaggcgctcagctgaatctggaatgtgaaacaatctacaggagaatgaccaaaattcatcaagaaacaaatggcatttagaaaagagaaataaatcacatttttaaatgtgagaaaaagggaggactgttataaagaatattaagagacatatcagtctaatgcaatgtttacagcctgactctaaatgtaaaaaggaggttttgagacaattgggaatatttgaatctctaccaaatattaaatgaattggttttttcattgggttagatgtgataatgatattgtggttatgttaaaagaaattgtaagtccttatctactaacaatacctcctaaaatgtttatacatgaaatgagatgatgtctgtgatttattttaaatactccagcaagggggtgggggtcaagggtgcatgcaggtttatagtgattttctcttcttctgtatgtttggaaaatgtcataataaaaagtttaaactaaaaaggagggcagaggatgaaggcagatcactaagtatgaagagttgtaggtacgggtttcagaaacatttaggtaggtagtgagtgaggtttggccccacagagatgggactgggaaggcactcagcccctcatgcattctcaggtcatctgagggaaaataagcctttgcacaccactctggaattcatttgtttattcactcactcactctccaattcattgatccatcatccatccatcggttcattgtgcagtcaacacacctgtttgttgagagcctaccagaaactgagatgtaccagaaactgagaatacaaaggtgatcatcctgtccttctggcacttacggtgaaggcaggagagtcaaacgcttgttaaatctgccattacgcagatacagcttcacaaaccctgaaaagtctgaggtaggaagtggattgcatgccatcaagaagtttaacatgggcaaacaagacttgttctagagtcagagaaggtcggggaagctttctctataacatttaagctgagatttgaatgatgaaaaggagacagccatgtaaagagcccagggaagggcgttcaggcaaaaagaaaggcgagagaaaatgtcctggggcagaaaggagccagggattttcaggagtgttcagtatacaataggtacagcagagtaggaagcgagactcacaggctgggggacatctggggctgttaactgctgctcttgaaccaagagaaatgtctctcccatacacagaacatgtcatatagacaagaggcctcaggccagatgacaaatgctccaccagttatcaagacaggtatgggggaagtgcgtgtgcatgtcagagcactagagaaaatgttctacttcctgaaagaattttaatttgggactagggtggaggggaagggaagaaggcggccctggggcagagaagaggctactacaaagggaaccatcagaatcgctgagtaagtaatactcccaattagagatttaaaaaccaatggtgaaaagcaggcttgtgctcagctcagccctccctccctcagccagcctcagtcagggaaaggaagtcgtagccaactgtggggacaggtgcctagtgatttatggccctaagacaaaggctcccaaggaaaggccctgcgaaactcagacgtgttgttggaacaattagagcccatccatctatttgagtcagcacagcatctggaaaatgggcctggtccgggctgaacaccagctcttcacgtgggactttccacatggtgaacacacacaagaggccagtagctggtgggggaaaagccccatttttccgataaggaaaatgaagctctcagaaagaaaacttgttcaaggtcatcagctaggagattcaaactcagatctgttggagtcgcaaggccacactctttttggcatttcttactatctccctggaagtttctgcaactgccctgggtggctagtcccttgggggctactgggctctttcttcagttttccaagatggggctgctgttgcccctgcagaaagatttagccctcagatctcaattcactctaaaaagctaagctggtgtatccaaagccaatagcaggtccctctcctgcagaacaaaatgcgtaattcctcctctggaactgtgattctacagggacctggaaggggtcagtggtatcaggcccctgcctccaaactatgtgcagtgtcctgggcccttctaagaaatgcatgtcagaagcacccctcagggcacatgcatagccccgtgagctgattccagcagctgcacttcaggagtgctgtgtctgactcagctctgtgatcccagcacagcgtctgatccagagaagcacacagcaaatgtttgctgaataaaggaacagacctttagcattggagatatcgcagcaaacccaactttagaagaaaaaacaaaaggatggcttattaaaataagcttatggtacaatgttcattgtaaaaagtggatgatacaatcatatagcaaaaaaagtcccacaaaaatccagtatacatttaatagtgtaaagtaacatgcatatatttgtgcactgtgaaaattctagattaaaatgtaagccaaatattaacagtcctatcactgtgcagttggcttatgtgtagttttatttgcttcttgaattttttttccaaaatgtgttataagagcatatgctattttcataataaaaaggaaaagctgtaactatttttttccataacataatttttacatgataaagtttagggtgctgtctgcctctctgaattcagaggcagctgctgggtgccaggcaaggcaaagatgttgtgtgagctcaaagtcagcttcctcagtccacagaccccagggccacaggacccacactggcctcaggagccacccattccctgtatgggtccttggggtaaggaacaacatggatgccagacctcacagccatcttccaaaatcttaccacagccaggtacatttccacgactcctttctccgtaagcaagtcagtaaatcaaagtgcatctcgtacacaaggtgggccctttctggtaaaacacaaaaaaacttaatctttggtccagaagcagtagattgcggcagcaagtcagcagccaaaaccattaatctttgctgcattccccaactggcccgagtagtaaagaagataataccccagcagaatcagtgacccactacaaattggtcctgaaaggtccaccagcataaatagacttttgctgatccaacacttgttaggaaccccaacaaagagactattggctcatctgatgagccgcttgcaaggggcccttgcaatggctggtgatggatgaccaccctcccttggaggggaagatgcagctcctggtatggggccctttctcatcttaaatttgtcctcaataaatcacaggtgcagagaagccagcatcagtttcattacacctacatgctccagtatcaatcacgccaccatggcggcctgtctgggtgcagttcatttcaagtggctgtttctgtcctgattccatttccactgcaatgcacgcctccaaggggctggggcctggagaacgggaggaagaagcttttctgtaaaggcctatgcttccctggcctcagtacctattcccttctccttgtctattaactattccccaaatgtgtgtcacttggagctccagatccagcgcctgtgcaaagggctgaagccccaggatcagaaagacttgtttttagataataggtctgacatttgccaacttggagcaagtcattttactttgcagaggctcagcttcttcatatggaaaatggggctaaagacacctgcatctggagatgaaacacagaagtaattgtaaagaacctggcacaggctgggtacaaagtgggatcttcagttcatgtcagtcccagtctctgctcatccctggctgagatgctggttgaagagaaagtattgcagggatggctgatcttgctttccctctggtactcaggccagtgagaaagtggaaattctgttgttcctcttctctgtgtctacctgcctggaccattcctggtgccagcaaaagtatgtcaattatggctcagaatttatgaggatgctgccacagctcgttttttgtcttgttcctttcattgtaggcagttaaaatacacttaaaactaaggacaccagagagctctcagacctcttcttaatgcacataatcaaatactttaatgtcattaaatgcataaaggctcatcataaaagctgtgaacttcttttttaaagaatcataaatgggaataaatggtttctttttaggcaggtcctaagccagttcacctacaaccactagaggcaggacggaagcacccctccaagcctgccaataggcctcctccagagggcacagcccagctgcctctgctgtggggtggagctctcaaggcctagtggcagccctgtaaattgttaactaaataagtagatctttgagcagaagagaggggagtgcaaaggaccctgctcctgagctggtaaggaatgtcagacgaaacaagcttttcaaaaagacacttccattcactctaaacctacaagaaagccagagtgacagggccatttatttgcagaagagctggggagggggtggaaagggaagcagagataaggagaaggagcagagaaataagtaaaggagggaaaggcagggagagagagagaaggttcgcaaagcatgcagagagagggagacagagaaggagagggggcaggctctaccccagggtccagtgtctcatccatcaccagccattgcaaggaccccagtggttcagggtccaatgtcttggtactgcatgttggctcagaattctgagacagagcctacagagctgcatatatatccaatacatctcagagaacagaatataatagcaatataataaagatgatgatgatgatgatgatattgaacatttactctgtgtccagtctaatgtctaagttctttaccagcatgacctcatttaattctcctaacaacgctatatggtagctactgtatttcatcaattctaagacatacattttctttttcccattttaacacctctgaaattgagatgctttttaaaatcactatcagcctgccagcagtcttgatgtcactgtcatatctgggaacacacatcaaaacttgcggaacaagtatttgcagcttaaaatcctgaggacaatagaggagtgatttttaaagaaatgctatcacaaatgcctgcaatgtgacagcagatgatagtctgttgaaaaacatggacattgacaatgctgagttcgtctctgaatatgaggaagttttaggaataacttaaacaattatttcacttatattttccttttcatgtatgtatacaaaggtcttgtgacaaacacctatgtttaaataaacctgaaagttcttttcataagtataaaaataaaattctaagtgataagaaagtattatgtcatggtttcactggcagtgatttgactgttttttagtgtttcataaaataatggtgcaacatacaagctctctaagtcccatcttatagatgagcaaactgaggcacttttattacttgctcaaagccacacagatagtccaaactccaggtctttctgattctagaacctgtgttctcagccattattgatcttcatctctgacatctctgaattcagatcaacataggttctgattccagctttgccactttctggctttgtgacccatgatactgatgtctagtagtctctgagccataaagcagaaatgctaacgaaacctgcttctcaaagttatgtgtgggaaaatccgtatatgagaaggttcagcacagttcctggccccaagaaagtgcccaggatgtggcaggctgaagaagggtctacctataagtctgcgcacatccgaatccaaagaacacccacgcagcagcggacaaaagactgggtggcaccaagagctcagatctaggactggaactgtgtcagtaaaagatgcttttagcactctcaggacaagccagtctgtatacacttcctggtgcctgcaagatgctcaactcttccttcctactaacaaaacaacagctgcagtgaccgcaattagtgtattactttattattaccatttatatcttttgaatgcctacactttgggactgttctaaggcctttacccacattgtaatctcacaataaccccaggagtaggcacattacagatgaggggaaggctcagagagttgaagaacacatagggctgtctttgggcatcctgggctgattcagagaacaaatacgtccagtgtcttaggttaatttgatactttgaggtcccgtggttccttcccattaggtctgagattcaagttaagacgtcgacttctaaaagtcataaaggatttcttctccgctgccccacaccaatgataaataaaacatgtttaccgtggaaaattcggaaaatatttataacaaaaagacgtggtcacacataatcccattgcacagagaacacctcctggtttacatttttttgctccttttctcccattcttatttctaaccatattttacacagtttatgttattcatggaattttatatcttgcttttaactcctggcataagcatttcccacgttattagaaactcttaaacatcatttttattgttaccaatattgttgaatgggtggaccataaggtccttaaccactcccttcatgtgggagcatttaatgtccgcaggcacaaacttgtgtgcctaaatctttgcttacatttctattcctttgggataaattatttacaatagcattactgtgtcaaatgacttgtacatttttaagactcttgatagatattgtcaaattgtaattcatatttaagaatatctgtttcaacctttttttttttttttttgagacagagtctcatttcatcagccaagctgcaatgcagtggtacgatctcagctcactgcaacctctgcttcccaggttgaagtgattctcatgcctcagccaccctagtagctgggattacatgctcatgccaccacacctggctaacttttgtattttcagtagagatggggtttcaccatgttggccaggctggtcttgaactcctggcctcaagtgatctgcctgcctcagcctcctaaagcgctgaggttacagacatgagccaccacacccagctgaatattaacattttttattgttattctgataatgaaatttttctgattgttttcaattaacatattttagtttactagtaagcatgaactttaaaaaaaaaaaaaaaaccttattttacaattgtatctgtggatttgtgaggttacagcaaagcagttaggagcccctgcctgctagattaagctgagtgattttgaatcctggcccctcacttacaatatgcgtgatcttggggtgattatttaacttctcaaagctttattttgttttctcatcttttaatagggatgagaataataacacctaactcatagggtctttgtaaagaatgaatgagaaatcccttgtaaattatacctggcatatagtaagtgttcactaaatattagctacttgaatttcttttgcaaattctttttcatacccttttctcatttatctgttgagatcttaatatctttcttatccatttgaaagttatttttataggaagaacattagccctttgctacatatgttgtgaatattttctaattggcttttaaagcaacattctttctctcttgatggtctccatgagagtattttagggccatccacatccagtgaagctgaagggaagggttaggtctattcagtaaagatatagaaaaatgaagtagttttcatttccaatgatgcgccccagaaaacattgcttccattcacaatgctgcatttctaatagatgaggtaagaattgatggggtttgtcgtactcacaaaatgacgcccaagcggggatgcacggagaacgttgccacggctccgacatgttgatgccaaacactgcacgaagcacttcgtgtcagggaaagaagcattagagctttctcgagcccactctttctcagtttggaagctgtcctcatgttcacaaggatattttggtagaaaacctccttttccaggatctccatttgcccgtcgccacttctgtgtactcagtacttttctgtcaacgagagttccaaggagtgagaaagcctgtttttgttttcattttttatgtctattaaaaataaacatgctgagaagctgcctcttagtctctttatcaagccccaaatgacgtgtagcccttgtcaactccgcgttgacgaatgcaatcagcatttacaaaatcagatttgtaaggcatcgggaataaacttaactaagggcaggtttcccctccattgatcaaaacgggtttttgccgaatgatgggcagtcggtcggtccctcaaagtaagtaagcgtacaggcaggcaggatgctgtccccagcccacccacctgggcccagctcacaggacacctggcaggttcttctgctaagaaagccgagaagcccacctctttatgggtcggcacaaatggggtacatttcatgctgagtcaatttaatcaatacttttcttgctttggaaaccccgagcatttagagagagcaaagccacactacgcagtaaagcagctttaaattctaatgagcttctctgtgctaattaatgactttgctaactggaagctttctttgttagaaaacacactcttgcctttcaagatgacagcttttcctttcccgaatgtcttttattatcaaaccagaaagggaagtactttattcctctcattctgttagaactaatagatttttattacttaaaaaataattttcttttagtaaccagctttgcattttgccctataaaagctagaaagtgcaagagatcaatttctcctaaatcctacctgtcacccgcccggcaggaaacggagttctagagggtaaacacagcctcttctggaatagacacaacagtatgccccctcccgccccctcccattgcacagtgagatttggtaatttgcaaattgagcagccatcattattttttaaggagcaaacagggtctccactcctcactaggagaatgtggcccaatcatttgtctcggcaacgcacgaattctagagcacttgagaattcttagccataaagctgattactaagagagggatggttataaagaaaaaaatctttttaatctggggaggaggggaagggaagatgaagggcaaggaggaaaagatacatagagctcattgctggagttatcagcccgaatcagagcttgaactctaattttttgtgaatcagaattcacacgtgaatgtatgagtggaatttctctctctttctcttttctgccttgttgttgttgctgtctgacaagagagtccgtctgggtctctctgtcactatcgccatctctgttcctctgtcctttctgagtacttgatgaagataccctgcctggaaataattgcattcagacccctgagtcccacttaaaagtctttgggactgatcgagataaatcccatcaggcttttgtttccactcaaagtgcctccatcatttactagacgaattaaagtatcaatttctgtttaaacattaacagggtgatgccaaatattagttagttcctaataattctgagggattaaaaagataataaaagtaatagtccattacattacctacttcagcaagattgtaatgaacgtaataaattctggatcagggttataacaacttccatctatttaaaatgaatttgtagggttactttcattaactatgtatatggggaaaatgatctgacatattaccttaaaagagctgtaaaaccgattaggagaaaatatgctttccagacagggatgctggccactggggacaactgcatccttgggaagtcggaacgagctgccgagatagcccgattccgtccttccagcactacctgcttgctactctgaaaaaaatcatgacagcatcagcgctggtgaacgagggtgagggaaccttctttttccccttctccttttatttatttatttttttccttcccaggtatattcctgctaatgaaccagggctcactctgggaacttctgcaaggaaataaaccctaggcctgcagcccagcctggcctttggacccccaggggaaagctgccatattaaaggggcccatgccctcattgctagaggagacaagggagcgagcacttgactgcaccacagaaattactgctgtacctcgaatgcccgcttcatttatcaatttcatagcagaaaaacccatatgactgccttgttcagtcgcacgctaaatctagtcacagaaaactccccaccgccagtcaagtgtgttacgcacaggcctggataaagtaacttgaaataccactaatgatttatacttaattgaacttctaagtgattaaagtggcagtaatgaatgaataacaccctcctcattcccttgaccacctggcccagcccctccaggcagagtgggcctcgcctggggaagtcagcggggatggccgcctgaagccattctctgggctccccaacgctgctcatcctggctcaattgctctcacttgcagtaaatgactccataagcaccgaatcagaccattgatcctttttattagattacccaattgtaaggttaatgcatttgcatttggcaaacggagtcggtcaactcaaatccctagcagggatcagcgtttaaaaggacacatgtgggagcaactctgtcaacacacagatttgctggcagcagtagccagatgctgacgcccttccttcccgtggcccccccaccaaagaaggtgccataagaatccacttccaggcctgtgtcttccttagcagcagtcctcatgggacagccagggggccacacctgctgcccatgtcctccccacccccagtgcttctgtttctgaaagaaggaagaatcctgcaaaagttttcagtcaccacagacagggataaaggtggatagttcacctcgggccaggaaccttgctgccttctctaaatggaggagagccaggacttaaatcagtgacaaggacacaggcttcagaaaccaaaagttcttcttttctgatggtcatagagtcagacagggggcagccatttatacctaggcctctatacccgatgtgaatttattcttggattttctaaatgcattaaccaaatgctatttacgtggtctgccttcattaggattttctagtaaagaaattcataagttggaaaaacatactttgttgatctcatatgagttctgcgttggagaatatagccatggtttaggggaaattagaagttacccagagaaatcaccccagaaaaccatgtccttttatagaagaggaaactggggtgcagacagaatgaaacttacccaaggaccacccccaccacagtgagttcacagaaaaactcccgtcttctgccttccagatcaccctgatgggccatcctcgggtaagaaagcagtactctcagaagaggtggttttgaggctgtgacagtaaagaaatagtctttttatacaaatgtcttaagacacaagccatatttcatattcagctgcataaactaggtctttgtctaaattgttttgtggagtaagattcgctctaagtattgcttacaggatggatttgttcagcatcttgcctctgaggacaaggaagctggtttcatcatttccattctgttcactttttctgctgttcactttctaaaggtggccaggacgctggggaacaacccatcatgtgaagtcagatactgagggttcaagccccagccatgtcacttacaggccatgttattgttctgagcctcagcttccttcattgtaataattcctccttgctgaattgttttgagattaaatgggataatatacgtgaaaatgatcagtgcagatgaagctcttatctagatagggctccttatccatgagttttctccctcctggtttcatagaaaaagagtgatcccttgggctttacaggcagtaactgactggtgacaggtttcctagaaacagcccatgtcagtaaagggagctgtttcccgtcccagctctttcttgctttgcaagagaggcccaggcccttgccagcctttcatttgcctcctctgctgaaggctggaggctgtaccttctttgaatcactgctcagaacttgtctgagtctcacagggcctaagaggccatgaagataggggtagggcaattcctgtaacaacaattcaattacacttcagttgccataatcgtcattcacttacattttttgagtactcgtcatataagtattttttacatgtgtttaacctcatctaagcctctcagcaatcctgtaagattcaaatggccatgcccactttacagaagcagaaatcaaggcttgcataggtcaagtggcagtccaaagtgacacagctgagaggggacagagctggggtttaagctcaagccggtcagactctaggatccgtgctccatcactgtgccccgctcttaggactcacagcacctttgtggcagggcacaagccagatgtcagcagggaccctgacctatccttcctcttttagccagttgacccattgagccccagggacaggtatttgttctcagggaaagcagagcatcagaggagaaggggaaaaaaatccccaagtgagcaacagctgacctctgtgagttattgagaaagtgccgaggtggcaaggctggtggtgacagggccccaggggcctaaaagaaggatgcttatctgattgggagtgcatgcgggcagattctacctagagatagttgcggctgggctgtctgggaagagagggcaaagagaggccccagctggaataggctaccagtccagaaagaagttcccagcattagagcttgccacccaagaagcttcagacctgagcaagccaaatcccaaatccccataggccatgccatcagccgtggcctctgttctaaggaggacacacagaataccgggtgtaggaacagatgtctgtctatgcatagacatggacagactttgtctctaagtgggtctgtgcttgtctgcaggggtgtgtgtgagtgtgtgtgtgtgcatgtgcacgtatgtgcccacacagcatctgagagtgatgtgtgggacagtgtctctctgcagttgtgtctctctgtgaggatgagggtgggtgggcatgtgtatgagtgaccatggctggtcccaggactagcatctatggacccatggaggtctttgtgcctatgactcagctgaggtgaaggatgatgggggaacagttggtcccatcagtgggaatgtcatgattcacagaagtaggttccgggggaccgggaaggaaggatctgctctgtcttgaagagtcaggaagggctgcctggacgaaggggcatttgctacatggaaccttcctcctgagtctctcatgggctggacctgaaccataatgtgtggaaacccctgttaccacccagtcatatttattctgtcgtccccagagcagtttgagacaggccaagcagcatgatgggctgaggagttaaccagcctcttcccccgaaatacaaacacaaaccccccaccaagccctgtgttcataggaggagatgggagtaaccaggacagcccctggccacctctgactcctggacttggggctcttgaatactgcctggtgggtgtttccctgctggactgacctgattttttatgcacaatgcagaacagaaccctgtccagagttgggtactgcccctgtgaccagggctggtgtgggcaaccgagcttgactctgtacctctggcctggaggctgcagtgcctgaaacccacttctatcaccacctcttactgctgtatgatttgggacaagccctttgagcaacgtgagcctcagtttcctcatctgtcaggtagaaatgattatttcccccatacctcagtcattgatccttggtggctgtgcctcaaccacatcactaagccctctgaggttcagcttgctcatctgtaaaacagggacaataacagcaaatgagatcacgtggagaaaagcacttcaaaatttaaaaattatctggtgcttgagagaaatcacctgtgagatggaaagactcggccagattttcaattcttggctccatctgcaaccctggctggcatttcttagaggatgcaggcctctgggtgttgcttcagtggccaaggaggctcagacagagagctccaggaccccaaggacaggaaggcccatggacggagtctgccggtcagaaggcaccggcccgtggctccctggagctgcacagcaatgattcaggaaaaggctgacaaggatatcagcagcgtgggtttttttaatcctgagtccagagaaaatgcacaatcaggaataaaggcgcccaagagagcaaggagaaggagaaataatcagaattagccagctggcgggcagcacaaacaggggatatgcaaccccaacagggttggagcctgtgcaggaccagctgaggaggtggccacggattgggcaggcccagacaggcgcatgagggaacttgggctggctggagcccagcaagcaggcagaagggaagacaataaaagaagccgtcatcaggtgagtccagcaccctcggaggctgccgtgggcccccctggccacaaggcagtggaaagggtgctgccagagggcttcagtgctctgccccgcattgttcacgaagctctggatgtggacgtcgggtttcagagcggccaagagattgcccagatcctgtagaaaggctgcagaagcctctgcaggcagcaggccttcacacccccctccctcgaggctgaaaccagactaggatgacagagtccatggccctaaaatttcactggggctctctccctggcagttggacagggtgtatcaaggcatttagggaggtgatcccagggcctgctttaagaacagaaaggaatggattttgatgagctggggcagagaaatccatttccatgggcaatggaactgatgttgttcctaactgaaacctgcttttcacaaatcatttagactatcagatggcttaagaaaaagccctggtcctgagagtgatgtgtgtgtgtgtgtgtgtgtgtgtgtgtgtgtgtgtgtgtgtattgggagagggcagaattaatgcatccacccttgattccactgcagattccaaattaatggagtataaattaatgacaaacgtgtgtggcgtcctggaagcccagtgctactgtgacaccccctgattctgggtcctcaggcaaagtgcttccctgagctgctttcctactaatctgatatagaggaatgggaatgcatgtccccaaatcccccttgccatggccgggaccacaacatccattcagtccagcttttttttttttttaaccaggaaaggcctcaaattgaagatttgacagtgtcggcaataattatacagaattaaattgtgtgcgtgtgttaaaagcattcattggctaaatgtaatatttattacaccacaattttgataataccatttgcgcctctttttctgtgatatttaatattccagaagcatagataaataaaggaatcaggacctctctgaccctctaacctctgatcctcattcccagttcttatcatgtaggttcctttcactgtcactttgaggtaaattgggatcttaggattcaggagaagcctagaaggagaagagggttacttcccttgagcactgctgattgtccatatctctctgttaaaagctgtaaattacactgactgacacggagagcccggcagacgttcccgagaactaccgcaagctctcggcattactctctcccatcagagctgcactgtctctgggtccgtaactgagcaaacaccctcttgcatttgtacgcctctcctgggtgccaggtcaaggcaggaatcacctggacctctcacctccccagcccactctccatgggtcatctatatgaacatcaaacccaaatcacaagcccccaaatttaatttatttctacctaaacaagttcttttatcataaagcaataaatttgtcttggtgctagcaatttgttgcgggtgacataacattgcaaattgattaatcgctactgtacgcagcaaaatgagaaaagcaaggaattattatgaatagcgtccgtcttttacgggagggattcattattcaaaagtgcttgctggtgcttacatgtgccctgggtgcagattacatccatttgcagacttcccacatcatgcttacacaaatcaacaaacgtgcatttattaagacgtagaatgaaagctatttaaaagtgaaaaatggccttttgcattacttttcttcaaggaaggcaaatctgggtgggatgttcctgggacaagtccccacagttgtcacatgagtgtctctgggttctatgcaatctggctcatgcaggtgccaacaaatctgcctgctatgcctttgacagtcccaggatcagaaataccccaccagtgattttgcaacccttgctatggctcaggagacttaagcaattggctgtcactgcctgctggggaaatgcagcagagagttctcagttctccaaaaatgagcctccttaacttcccctgggagggggaaaggaaatgaatattaattgagtatctattctgtaccagacactatcctgaatgctttccttgcattaataaggcaagtccctctacctccctaaacctcataggattgttgtaaagaccaactgaaataatgtgtgcacataaagcacatagtaaatgctcaatatatattagctatgattgctattataatttcatttaagcattcctaaggtcagtattagtaccatcattttacagatgggaaaactgaggcttagaaagatttcaagatttgccaaatcacacagtcagtgagcagggctgagcttcaatttaggatctgcctccaacaattcatttttttgcaaaaccacccccacagctatccttgacagtcaaaataagatgtatttgcttcctctaatccaacagaggagtccacacaccaaccacacattagctacccactctttgccttcaggtgtgtcagaggggacatttgagagggtctggagatttcacggccttccccatctctgcccctagctgttcccgcataggtagagccctcatctgtctctgattcttgtcccttacttctctatctacttgtcccgttaccaaggacacttccagaaggaagcttgttgcctgccccagtgaaaggctgacgggcggctcacagcttcagcattgattattcctgctgaactcatgctctgcttaaaaatagactaagatctcaactttcatattctaattagatttcaaagcgacttttataaaacgagaatgccttcattgtttttctgctgcataaagggctattaaccgctccccagccaagctaaagtcctttctaatccctgatatcacccataagatgagaatagttactcatcagcttccgagaaaaccgtactgaaccacaaacgtgtctccaggtgtccagaatccaggggtggtcgggttagaagcctgggcatgtagctcaagctgagagttggcccctgtgagcatatctcacaagactacatttcaccaagggtcttcctccaaccacctgccctgagatcaacccggggcttatatgattctgggcatccccgagatctgccagactcatctggttgtgtggcctggcagtctgtttgacaaactccctgtaagatttgtttgcacactaaaatttgtgaactatcatcccaagtatttctcaaaccccatgcccagttttttatgccaccaaactgaaacattgattattgcaaattctggttgacttacaaatatccttcctcaatgaaggggagatatgacctaagaaggaacttgctattttgaggcccagttgactctcttcctgtcagctgtccccaccatagtcccacaaggcatccttgggctcctagcaagaccagggtacccaggctaaattaggctgtgagtcactttttgcatagtctggggggcaagaaaagaccagatgcccagacatgatggaagtgacaaggacatctctatgcaattctgggctctgtttacaacagtcagagccccaagctgtcaagtacctctgtcccaattgttatcacaacctgtcgtcttatgtgcccttgagtgtagttgttctcaaaccttaacatcagaatcacgtggaggcttgctaagacatagattgccgggcctcacctcccagagcttctgactcaataggtctgctgtggggcctgagaatttgcatttctaaaagttctcacatgccgctgctggtccagggaccagactttgagactctagactctaagctccatgttatatctccagtgttaagtacataataagaactcaatttgtgtttgcagaatgaatgaatgaatgagtaaatgattgagtaaataacatgaactaccttcttgagctctctaactgggactcctcactccactccacttcacttgtggttatccagcatctgctggacatctgtaaaagcatccaggaggtgtatgtgtcctggggccaggacagggtttgtggtttctcataccaacaaataaaaatatggcttgctcaggaggtcagaaagctatgcagggagtgaggtatcccatcctggccttgataagggtaatggtgactcttaccacctcaaaacactggcccataatgtcctaggtgggtgacctcaagctgggccctcagactccaaagagtctccatttccttattcatgaggttgggcatggataattgtcttcaggataactgtgccgattcaatgaggctatacatgaaaacagttcaacagtgtctgtctggcacatgtggggggcttggtcgatgtctgttccctcattcattccccacaacccctgactcctgtgaaatgagtcccagagatgtttcgggagtaatgaattccctcatttcagctaagccacccgtgatcctggttttgtagagatgtacgatgcaacatgataaattattgttttaagcagaggcttcattcaaatatccatttccctgtcaagttaattttgtttggatgtattttctagcgggttctgactgggagcacggttggtacataaacagaagaacattatgtctttggcccgttctctgagtgacagggagctgatggcaccggggagggaagttttgtggattatcacggccaagaatccccattccccagacatactaagttggtggcatagctctgagggctaattgtagtcagttcacctctgtctgcagagcatagcagcacctcatctctcctcaaatggctgagttcctctaggaggggcatatttcctaggaacacccaagaaggtagctttgtttgtatcagtctctagttaagccaggagccaaggccttggcttatctcatttccccctcagccccagaagacttcagggtgaatttcccaagaacaaggacattttcttacataccacagtaccatgatggagatagggcaattaacatagatgcagtactgttatctagttcacagtttatattccaattttgccagttctccaaagaatgctcctcatagccatttattttctcagtttagggtccaattcaggatcactcttttgagtcctccattctggaactgttccctagcctctctctgccctccatgaccttgacatttttgcagagttcaagccagttatttcatagaagataactcagtttatgtttgtctgatgatacttcatgattagattccagtcacgcatttttggcttacataacacaaaagtgatattgtatccttctcaatgtgttctacttgtcccactggtgatgttgacttcaatcacttggttaaggtggtcatccctggtttctccaccataaaaagattattttccctttgtgatttatcagtgatttgtgggaagatactgtgagatgatataagtatccttgcacttgttttagtctctattgataattcttgcctaaatcaattatactaggatggttgcaaaatggtgatttttccaaatccatcacatcttctacatttctgagtgacattatactgtaaaggagagtgttcccttctccccatctatttatgtatttatttatttatcgctaacactatgggctcagagattcttcttttattcaatgtgctataatccctatcattgctaccattgtttgatgcttcagttgcatgatctcattgaatcctcatgacaattgggtggtatggcactattatcagagatgtctgcatttccaccttaggtcctgaagctatgtcagcaaggctctgattcccaactcccagacccaggctctgtcctggaaacactgccttccctgcagggctcacataggaagacaagagcccacacataatgtcaccaagcccagacttcccactaagcaccatgggaatgaccctacaggatagaagaagcttgacttccctagcgttctcttgctctgtctgaggcagctcagcctggaggcacagaggcagttatactgggctgtctagtgacatgatgtccccagtgactcttgacacaagctactttttgtaactgactggatgatgagtttggccactcctaaattcatcatttgacaaatatttgctgaccacctactatgtgccaggccctgggctagcctggatttacagcaatgagcaagtcagatgaggttcttgttcatggagcttgtattcaagtgaaataaactgtaatcaaatgatcccccaaacaaatatatgacaacaatagggatgaggcctatagaggaaagaataattatgatgaacatccccaacagggggatttgaccttgtttcggacatgagacagcagattaaagtaagtggtttaaaacacactgtttgagaccattactcaaagtggagaaaaggaagctgagactcagagaggttaagtaacttatccaggattgcacagtattggagtccagactcaaatccaggtctgctgactcctcagcccaacactggtgcagctcttccaccaaaggggttccttaagggtctccggtgattccgggcatagggcccatgtccatctgtttgttcaatttagcatactttgtttccactgtgatgctgtgaggtcttgctaaggacagccaggggataatgactttctgataagcccaaacattctctaaatcagttttgatttatttttaaggactaaagccaagaaaactgaataagcctcaatattaaaacaaggcaagtgaatgtatgcccatcactggacatcagagatctgtaactgtgcatcaggctgtgagctaagcatagagggaggctgagagtcacccaggtaggtccaaggccagagcccatgctcttaaccatagcactgggctacctccctggagatgtctggctggctggctgtccatctgtctgtctgtctgtctgtctaggaggctgcaggcaagtccttagccctgggagcggcaaggcaaattccaagaagaagaaaggatgcccatgcctgcccctgctgctcaaggaatcaggaagagtcgaggtgggggcagctcaagctcatgcctgcaccctgctacacacccacaccaacacccccagcctccaggtctcctctggctggccttggcaggtcctggcttgatacctgatccctgtggaagctgacacctcagcatgagagggatcagggcagacaccgctgccgccacgggagcctcaaccgacttcagggagagacgctgaggacactggcctgaaaactgttccctctcactccacactcagagagatgcatgtaaaaattcttatatataataataataatggcaggaaaagaaaaagtttccagttaagtgacttgactgagtttacacagctgggaaactggactcaaaatccaagtcatatgttttcagagtttatacatttaaccttttcttcaacaagccatctccttgtataatcaggtaaatatacttgttcagtgcctggtacatcataggttctccataggaatttgtttaatgaccacatgtaaatatatgtatacctgtgtttgtgtgcgagtgaaggtatctgtgcatgtgagtgcacatctctgtgtatgagtgaaggtgtttgtgcacgagtatacatgccggattgcatgtaatgtggatgtcttgagtcctgaagttattacagaagattcattaagatcaggaacaaagatgcatgatagtccttttatctcagctcttgtttatctcacgctttcccctctggaaacagagaagagcataaacaccattccattcagctttaggatagggaactaatagccaaaaacccacttgaggcatgacatgattggcaacttgatggaactaaaagaccacagctttggagccagacaaacctgcttcatctcctggctccaccacttaatggggcttaagtgaccccgggcaagtcacttcacccctctgagctgctgattcctcacctgaaaatggacatgataatacctacagtgtggttatgaggattcagtgtagggaaatttcccagcacagagagtctgataaatagccggctcttggcataccttaggtcccttctttctccttaaagacagtgtcatagtggtcatcttagtacatttgtgctgctataacagaatgtctgaacacaaattatatagaccagaattatatatgaacagaaattacatagaacagaattaaatagaacagaaattttttcctcacatttctgggggctgggaagtccaagatcaaggcaccagcaggcttgttgcctcatgagggctgttctctgtatctaagaggatgctttgatgctgtgtccttctgaggggagtgttcctgaggggaggaacactgtgtcctaacatggctgaaggcagaaggctggacactgagggaagtctttttttacaagggccttataagcaaaaggaaaactatagtgtcttggcaccagtagaatgatgattctcaacctcagctgcatattggagttcctggggagcttgaaaaactcctttgtcttctctcccccacctccccaagaggttctgattcaatttgcctgaaaggttgcctgggaatcaaggcttttaaaagctgcccaggtaatcctaatgagcaatcaaggttgagaacctcttgtccatagggcctctctaccatttattgagccgctcatggggtcagaccttggacagcctgctttgcagccattctgcttggagtttgctttgtcagcttaagccatggcagagggaggaagagggagaaacttacaccatctaaggctaaaatcctcttatttaaattggagtctgaatttccaaatcaaaactggagattcacaagataaataagtgctagagatctgctgtacaaccttgtcccttcagttaacgatactgtattatacacttaaaattttgttaagaagttagatctcatattatgtgatcttatcacagtaaaataaaaattttttaaaccctcaagactcttagtctaaccattttttctaatttgtaaatgcattaatatgcaaagtgttttaagatataaacatgtcttagatatacatttagctaaatgaccttgctaaaataaataaaaaccattcgacccactaatatttagtatgtgctatgtgccagacattttacctgcgatattctctcaataattgctactcactacaccctctgagtgtgctggggctggtaaggatggttatgtaaaaaatgcagcatttcccacctttcagacttaaactcctagtcttttatacataggcctctccacagatttctgagtcattttggaatttgcatgcaaaataaaagcttcctacataattgaaattatggtcaattgaccatgaaatggaagtgtccgtgaccaatgaggtgaggggaggttgttgtgctcataaatggggcctccagagccccagggccagttccctggctctgggagagaagcccacctgaatccagcttgttgtcctggccagcccactgcctttccttggtccctctctctggtgtagctccaataggagacattctgctgtactcttttctgtcttggttgagaaatcctctagaagagggcaattggagcagaaatgtccatatggaaatattttcctttctcaggtgatggttttgcaagagaaggaactgatgagccagactagggtataggatacccagagagagagagtgggagaggatgccagaaaagtagatgcagcccaactgcagataacttttgggatgcattgaagagccatcaaatgcattgaaagggaagttattttatataacctgcattttacaaagatcactctgcaaataggatttgaggggagcagatggaggcaaggagcccagccagtcagcttcaatgacaatccagccaggatgtcatattgtcatgaacaatagccatgggatgaaggaaaaaagaaggtagaagactcggaatgtgactaatagggacacaaaaaagcgaaaagaacatgtgctaggtaatagctaatatcacagccctgttagaaggtactgttatcatcatcctattgaaggggaaactgaggatcaaagaggttacatgtcttgctaataattggtacagccaggaatgaaatataggtccatatgtatttctatgttaataaataggtaaaatattaaggaggggacaaaattttgctctggtcaaactatactcagtgtactgcattcagatccagatccctactttaaggagaaactttgattggttaatggaatatatagagagaagagtgatggggcagtcatggagctgaaaactgtgttgtgtaagatgaaagttctggggcatacacctgaaaaacagcagaattggatggcatgtgatgctgtgttcaaatattttgggtccttctgaagcccagggagtgagcagaaggaaagctctgcatgagtcagcaggagccagaagagacatgttttaaacttaggtctttgtcttgaagacaatgggaagccattgacagtgttaagcaatcagtaacatgttttcattttgaaaagatcattcttggaggtggatccaagaacaccttttttgataaattgtatgtttccttcatatgtattccagaacatagcctggtaagtttattacctaggattttctattttttgttattgaaataaaatctttgtccattatattttctaactggttgttgtttgaattttggataaattttttttgtatatttattccatattcagcctccttaatgaactctttttattacttccaattctggttaattctgttaagtttctgaagatgataaacacaccttctgaaagtaattataatcctctctttcagtagttacaagttgtaatttttttcttgtctcattgcacttactagaatttctaaaacagtgattctcaacatagatttgttattctcaagcagggatgattttgccccctagggggcattcagtaatgtctagaggtatttttgattatcacaactggggaaatgaggcctctcgtggataaggggcattcttaatgtcaatgaaaatgccttttgtatttaactagtatctatggctttggctgttagtgtaaggcaggaattttgatgagtagagactttaagcccatattaattaagatttttaaaatcagaagtacatatggagtcttatcaaattattttataattttcatcaagatgataatattgctttttacatttgtcctattcttacattataatagttgacttcttggctccactgacattactttagaaaatcattgaccattgttaaataagcatatctctgctgtttctctccctgtcacacactgtaaggaattgcccatgtgaaaagcagcttgattacaaattaatgccagtaatttggagtgtctgcccttgtggatttcaatggggactcatatatgaagctaccatttgtttcctctgagttgtaacggctaaatatggataccatgagcctctcgttgccctcagctgctctgaagaatgactgataacctctttgaggtctgtctagattctcactcccacaaagtgattttttttatacaccacagaaacagacaatattagggcaaacaatttcaaacacaccctcacaatttgggggaaattcactcaggcatgtttgcatgacacagtaaaaaacagaaacttaatttttagtatagatttcctaatattaagctatctttcagtcctgaaataattgtgtgctcatggtgaattattatcttaagattggacttagtatcctaaattttttttaaatatacaacattcttactacattcaaaagtaagaatggtctcaagttttctgtctttatataattttggtatgaaattataagaattttgctatcccttttatgttctaaagcagtttatcatgaaatttaaatatttatattataacttagaaaagatgtacctataaaactacctggttattggtttatcattcttagaaactcactctgtaaagttaaataccccctttcacttccaatgttttgtagtaatattttgaccatcttgctagttgtgcaagagattttattgacatctgtggaacttctcttgcgtttagttgtaaattgtattgtttctcatttcttcttcttcttactattattattattttctttttgagatggagtctcaccctgtcgcccaggctggaatgcagtgacaccatctcggctcactgcaacctctgcctcccgggttcaagtgattctcctccctcagcctcccaagtagctggaactacaggcatgcaccaccacaccctgctaatttttgttttgttttgttttttgatagagatggggtttcaccatgttggccaggctggtctggaactcctgacctcaggagatccacccacctcggcctcccaagtgctgggattacaggcgtaagccaccacactcagcctttttctctcatttctaaattatcacttcctgcatttgtccttgaatattgctttttacctattgtctacctttttacctattgctttttacctattgaaaatatacattttctcttaatttcttatgtaaattgttcttttttttttattctttctcattttaacagtgaattcacttaaggaaatgtatttacctttgagtccagttttagccatatcccaaaagtttgctaaacgatgttctcattcttttcgtctaactatcccatgtctgctggtttaagttctttctaactcaaaggttttgttttcctttccattaattaaatattttccctctaaccttttcttattgtttcctatttttattatatggtggttagagaatttaacatataacttttatttggggaaactgttgattttttttctttttggctatcatgtaaacaatttgtattaatatatcaagagttcttgaaaagaagcttcttctctagaatatagtctccactctgggttgtgcatcacagagggaacacaggattatccaatagagtataaggaaaacattaaaacttgcattcaatatttattttcatcatgtcccttctctatttttgtatatgtttcatgtatcttatattagtattatagaagattaatattattaataatatgcactattgggagcatatacttgaaaaggttttaaacagagaagtgcatagtgaaagtgatagagactatcagtctaaaaagcacagaagtcaatattttaattcagtggtatgtctaaataattaacaaatatatttatatttaaactctatgctcaaaatgttctacatattgggattcacattcaaaaaagtttggaaaaaattgcattatcaacaataatttcctaaagagatagaaagcctttgtttatcagaattctaaggaaagcagggaaactaatttggattcatagggactgctaggctgaaaataatctaccaaaacagtgggaccagactctacctcctatttaaacatcacagaaacaaaaaggaagtcaagagaagcaggagaaggtgaggtcaggaggttttagggagcatttgacagccctgagccatggaagtgggagtaaattggaaaaattttgcctaaatttccaagggtcaaagtacatattgctgaactcctaagtatccttatttatatttttggtctgtgttaaattgctctgctattattgtgtttcatcacttttttcctaatgttatgttatttggcacatcaagattcctgactattatttttctttttcccctcccccttttttttattatactttaagttttagggtacatgtgcacaacgtgcaggtttgttacatatgtatacatgtgccatgttggcatgctacaccccttaactctccatttaacattaggtatatctcagcaaactatcacaaggacaaaaaaccaaacactgcatgttctcactcataggtgggaattgaacaatgagaacacatggatacaggaaggggaacatcacacactggggcctgttgtggggtgggggaggggggacggatagcattaggagatgactattatttttcttatggattgcttccttatcaaagtaaaattatcttctttttttctttttctttttcttttttttttttttttttaagacaaggtctcactctgttgtccaggctgtagtgcagtggtacaatcatggcttactgcttcctcaacctcggagcctcaagtaatcctcccatctcagccacctaagtggctggactacaggcacatgtcccatacccagctaattttttttattttttatagagatgaatttttgccatattgcccaagctggtcttgaactcctgggctcaagcaattagcctgccttggcctcccaaagtgctaggattacaggtgtgagccactgtgactggccaaattgccttctttagcactttgggaggctgaggcgggcggatcgtgaggtcaggagatcgagagcatcctggctaacatggtgaaaccccgtctctactaaaaacacaaaaacaaattagccgggcatggtggcgggtgcctgtagtcccagctactcgggaggctgaggcaggcaaatgacatgaacccaggaggcggagcttgcagtgagtaagatagcgccattgcactccagcctgggcgacagagcgagactccgcctcaaaaaaaaaaaaaatgtcttttacgttggagtctatcttgtccttgtatgccattttgacttaggtctaaatcatgtacaatgtttgtaggtggtttctgtttgcttgcttgctcactctcttgcttgcttactttaatccaatttgaaagtctttataatttgcattaaattttattctatttaaagacccaggtccacagaggaggtctacagaaaaaaaaaaaaaatgaaataaaaaataaaaataaacaaaaacccagagttctagatcttgctgcattgttattttatactgttcttgtgcttgtttgctattagttttgtttttcatcaagactatgactgtttttctaaattttgaaaaagtttgaaatataaaaagcactagaaataatatacaaaaatattcccataaactctgttctctttgatttttttcttctctggctgattgcagtgtataaaaccttcttatattcccataaatgattgtcttttcctggtaaaaactgtacttgaacctgtatttttctgttcattaatgtaatgaattaaatcatttttgttgatgactcttctgtaaaaggagtaaaaaagcatttttaaatttaccccaatccattcctaacccacttacatgttttcattaatataatctagaatttttagacccagattattaatatttaattttatgtttgtttatattatgttccactattccaggaattgtttctcagataattgcattgctaggtaaccttatttatggttattaaaataatagatatgtttaactgatcttaatgttcactgttctgacttttatgttgatttacccatttctctgtcctcaactttgattcatttcattcatgtgtaatatagcctcaagaattttatttgcttggctttttgtattttaggatgggctcataaatgatatactttgcatatatatctttctgttatcttcacaattgaacaacttgactgggaattgtatgctattgagtcataaccttttcctctcaaaattctgtagacatcgtcccatcatcttgcagttttcagaattgtggcaaagtctgaaagcaatctcatctttgtcctttatgggaaaatcgtttccttcctagatgcctgtagaggtcattcatttattaatacaggtattcaacaaatatttgtcaagcacctactgtgtgcaaagcactgacctagacacagcaatgaatggaacagagagaatgaagaacagagaatcaaggcagagagaaagaacagagaattaaagcagagaaaaagatctgccttcagggacctctcaggctagcgggggagagaggcgataaacaaaatgaataaatatgacgtggactatctattatagggaatttctgatgataacacatgttaggaaggttaaagctgaagaaaggcataaggagttggacacatgaccatttaaatagggtcctaagggaacacttaataaggtaacattccgataaaaacctgaaggaactgaggagtgagccatgtggctttctggtgaagagcattccaggcagagggaagagcatatgcagagatcctgaactgagggcttgcctgatatgttcaaggaataatggggaggccactgtggctggagtaggaatgagcaagagagaaagaagaaactgatgagatgagagttataatggaggatcagatcatggagaatcttgttaaccaatgtgtacacaggtcagcctttcccaagctggggttccagggaaaacacacattgagcattgctactttccaagagtgagctatgataagcaaagcttcccaaattaaattgtctatggaatcccgttatagtagacctgtcagtattcattcacccatgaactcaacaaatatttattgagcacctactatatggcaggcactgatctggcatggaggatacaatgatgaacaaaacaaagtccctgccctcatggaattttcatcaatgtgtggataacaaaccacacacccctatgtatgtgagataaatgctatgaatgaaaaataaagcaggataaaatacttgtagaacactcgttttgctaaacattgatctcttttttttatttttcctaatgtatgactgacctttcaataaaatattaaaatttttcttaaggttgtgaaagttctctcctagttcaccttccactgttacttcttttgttgttctgatctcttttaaaattttgtttttattttgaaattttggagggaaatattttaaagtatttattatacacaaaagaatatacacactggtctcctttttaggaacagcagtgatctctatgctggcactctattaagtgccattctctgttctctatgtacctaatctctttgctattgtttctcctatagtctgctagagtttttcaagtttatccaagatttatgattccaagtccaatgcccacttcactattattagttcaaatgcacacttaaaatctctaaaaactcacttttttgtgatcacattagttttttatattgtttttaattataaaaataatatctaatatttattaaaatcatacctcatcccagatactctgctaagagctttacatgctttatgtcatttactactcaaacagctccgtgagcaggcaccgcggttatcaccactgaacagatgatgacattgaggcatagaggcatacacattaagtgattattgactattttctaccttgccaattctgctctgtgctgcatctaacattgattttaactttgcttatttatatttcatctttatgaatttcatttaccttattttatttctaactcctctcagcttgctcccttcatgtcatccattgacgtatcatcatcttatttttatttcttgaatcataaactacatatttccatgaattttgcagaaaggacaagtcagatgtgttctaaaatgttcttcagtttactatcatcaatcttttttaaaagtaagttcttcctctacgttgtgagtaccgtgttctctgttttatgaggcagattttctgtaaagcctcatgagcttctttttttcatctatttactcatttctgatccaacaaaagaaagaaaataaagacaagtctgcctagacataggacttttctgctaaaaaaaaaattaaatgaaaaataagactttcttcggttcttctttgctggccatctgggtgctatttgaatccttaagcccagaaattatgccagagagctggcgcatgtgacagcctccaaatctctctacaacttccagtgtttttagtctaatatttactataacttcgatggttcacagggagtgaggctgtctcagaaaccagccggctgatcatgttactataagaaggccacatactcctgaagaatctgtgtgaacagtaaattcaaactccaacccctgaatgcctgtgactgtctcaagattagctccttcccaaagccagacccacatcccaacatggccattacctattgtatgcacttccaccccagtgacattagagtgctggtcactgaactgctggaagagcattgctagggtggagtgagggaatctagaaccctggcctcctcagaacataattcccacagagtaggggtgaggaatgcttccttctctctgaaggactcatttagagatatagatacaggttggggttggggagactgaggctgccttttgccttttccctatttggccccaccctctgcctcaatacttcatctgttttggttgaaggaaattagatgcatatcacagattactattccaggatcctggtgctattaaacatgtcagtatttgtgtgtttccataaacatttcagtggaaaggaagggaagacaaaacaggggtgaccaacttaaagagaaacagggagacaagcttacaataggggatgggcagctctctgcctcagtcttcccagacctctgaccttgctgtattagtccattctcatgctactaaaaagacatacacaaaagtgggtaatttataaagaaaagaggtttcattgactcacagtttggcagggcttgggaggcctcaggaaacttacaatcatggcggaaggggaagcaaacacatccatcttcacatggcagcaggagagagaagaataagagccaagcgaagggggaagcccctaataaaaccatcagatctcatgagaacttactcacaagaatagcatggaggaaaccactcccatgattcagttacttcccaccaggtccctcccacgacacacgggaattatgggaactacaattcaagatgagatttgggtgggaacacagccaaaccatgtcacttgtcttacccctaagttaaccctgagcagagcagggactctcttatccccatcacagatgtgtgctgggccagacacagtggctcacacctgtaatttcagcactttgagaggtcaaggtggacagatcacctgagtccaggagtttgagaccaacctgggtaacacagtgaaaccccgtctctacaaaaaatacaaaaactagctgggtgtagtggcatgcccccatagtcccacctacttgggaggctgaggtaagaggatcacctgagcttggggaggtcaaggctgaagtgagccatgatcgtaaccactacatttccacctgggcaagagtgagcccccgtcttcaaaaaaataaaaaagatggatgctgaaagtgtggactctggaagtaggctgcctgggtacaaatctaaggtccacactgagcaagttactaaatctttctgtgcctcagttttcccatctgtaaaatgatataatctctctgatagttattgtgaggtgtaagtgatataatatttgagaagtactaataacagcacatggcacataaaaatgctattggttgattaaatgattgattaatttaaaagggtcagcactggtacctacgagcctcttctaggcatgcatagtctgtcctcatgggctacttccttgatttcctttactgagattggagctctgcttatggagacctgctttgcctgtccctaacccctggctaggttctgtcctcgaggtttgggctaactccttgtccccaggatccacaggatccttgatgagtgaactttaacgaaaattaaaccaagtaccaaaggcttcctatgtgccaggccttcagtactttgcctgcataaatcttttaactctcacaacaggtcaatgatgtcagtgctgttattatccccattgtacagatgaagcaagagtcctaaagtttcagggctattaaacggagatgggattcaacatgaaaaacctgaagggcatagccacctctctgtctgcagaggagagagactttgggagttctgagacaggcctctcttttatgaagaaatttctaggcaacttaaagggtcccaaacccagcatggatctggtgctctgtaaatatttattggagatttatagagtaaaaagttttgccctagatcaatgattctcaacagggtgcgattctgcccccgagcagacaattggcaatgtctagagacatttttggttttcacaactggtggggaaatgttactgacatctagtgggtagagaccagggatgctgctaggcatcccacaacacaggacagacccccacgacaaacggtaatccaagtgtcagtagtgccaagaatgagaaacacaaggctctgaaatcagctggcatgttcgtcttctccttatatctctgagaagacaaaagaaaccagatatcccaacccggcacggtggctcacgcctgtaatcccagcactttgggaggctgacatggggggatcacgaagtcaagagatcgagaccatcctggccaacgtggtgaaaccccatctctactaaaaatataaaaattagaccggggtggtggtgcatgccccaggaggctgaggcaggagaaatgcttgaacccaggaggcagaggttgcagtgagccgagatcatgccactgcactccagcctggatgacagagccagactctgtctcaaaaaaaaaaaaaaaaaaaaaaaagaaagaaggaaagaaaaaagaaactagataccccaaaatgccataatccaagaagggttctgcgccttgtaatttacctctgtaaatagggctctctctgtgcctttcatcccccaattcagtcatctccttatttcttattttgggggcaatctcagaactgcccgtgaagacaaaaaaaattgtgaatttcaggaggagggtggaaacctcgtcctttgggaaaattgagctgctgaacaaaaaactcagcaggcaagcccctcatagctcacagaggatgaagcatagaatattttaaatttcatccagagagaactgactttctgctccttccattcaagagcttttgttttgcatttaaatgacaagggagagattggggagaagccggcagcttcagcctctgtgaggagggaagttgtcgcccctctgaagtggctgcgttaatgtcatgtcattacaccgtattgctgcacaggttaatataattgggtgacgatgtgtgagcaatgatccgtgccatgttacagctctgaaacaaatgacatttaaccagccagtctgtaaggctccttgttatctacatggtgagcaattgaaacggagaagcagacctctcgatgagcaactgataaattagttgttgggtttcctcgacagcctggatttataagagcacaattctaacataatttattagatctataaacagacagatccaatgtttttactgagattacatcttgtcaccctcagatattgtgtcgctgacagccctgttataatttatttttattattctgataaggtgttgtttccagggatttatttatttttccccctaaaaagacattttcatttttagctggaaaggaatcagaaactttaatgctagcagatctccagtagccacccagacagcttttccatactatgactgtgagcttctaaagagcagagctgaagttttagcatgaattagtgcatggcccttggcctggggaatggcaggaagacataagggagaatctgtcgggtggcattggggcctgtttgaggatcttcctcttgttgaaacatcagcctgtgattgatatccttccatagagtttctcacctttgcaggctgcccgcctccctccacacctgcctttcaggccaggcagggcacagaagagtctttcctggctctggccatcactcacctgagcctgaagctaacatgtagcttcctggacaacagtctcccacaaagctattctaagccagctcctcctgaccatgtaaaaagaggggtgcgtgtctactctcaaagcccctctaggcaaagggtcacaggtctgagtgaccaacatctaccagtaaaggacagtggccttgccaagaactgcaagggagaggcaatgctggagttgtatgtccagtccaaagaacacagatggtgagaaaacaccccacttagaggcaatcagattagggttgatatccctccaggtagctgtgacttcaggcattctacttctcctttatgagctattgcccatctgaaacatagcagtgatgacacctgcctcatagtcctggtgagaataaaatgagataatgaacatagagtgttgctttattagctaaagtactgtgcaaaggaaggatacctttattagcattaacatctctaagctctagagatacatttttttaatctggaagggatatttttaatgttgttttttattttataataatgataatcttcatatagctttaaattttaccaggtgcttgcatatgatataagataacaagatcgttttcatctccttataatttggtgaagataggtgacttgtttgtctccattttatggataaagaaactaaggctcatggaggtaacccagagttagtccactggttacaggattctaactcacaacagaacaaccctacatccattactttgtacttccaataaaatcagggctttctctgctccaggttcaaatgaagcagagcatggctctggggacaatcagaatgaaagtttgtcaccagctccctgttctcgagagttcagtcacagcttgctcataggagaaatgatttgggtcaattcaccaaaagcctggggtacaggtgctctagggtttcagctccactggctttcagggccagcttccgtccccaaggccagaggcaattcttggagtcattcataaagccctccatgtctcatggggagaaaagaaattaatatcagaagtggcagcatctaagcggcagcttcataacaggcttgaacctcgacatcttggctacaactgggaacggctcagccaagcacgtcattgactcccagagtcctgaacccgagatgtgcatgtgggcttgtaggtcacccagtccagcccccttattttatagatgaggaggttgtattccagcgaggggagagggctcacccaaggtgacacagtgggtagggggcaaaatcagggttggaaccaggtctcgtggttcagggctctttccagcattgggttctgcatcaggcatactctatcattggaagcttttatgagacccagtaaaacagaggctccatcaaaacaccaaatacgcaatgtgcaaccctgcacagatctgttaagccatcactgcaacagcaggagctctacctgggagggaggcccataccccatcaccattcaccccccttggccttgaacctcttgcctcaatccactgtgaatttcagccctcccttcctttcccagctgcagcctgatcttactcttaaggcttaatgctaagatgtgctgattttctggatctctttctctgttctcattaaagttttccttccagaaaattctgcctcaggccaccctggtagttgttctccagcctcatccgatcctcaagaccctttcctaggagtggtatgggaagaaaaccaaagctttcaaaatacaatgtcagctgaaatattgcatcttcagggaaggcttccctgaccccaaccacctccactcaagactggatccgtttctcacatcctttgcaagcagctcttagtgtttgtaaggagacttgggtgtgatttctagatcagcacgtgtctcccccactagagggagctctgagaggccagggtgcagctgcttttgtttgctactgtgtggccagtgcttgtagggtgcctgccaggagataggtgctccataaatatctactcaaggagggggatgcagatgaagctcgtcttcacccacctccaaaatggtgagcttttcctggaaagtggggaattctgggggcccttggagggtccaaagaggatgcacctttaactaaagggatgagttcatctttaaagggagagtttgggctgagacactgaacaaagtgatagcaccctgtccccacttctcccgtagccctaaggatgttttatgttgcccatagctgaaaaagtgccccttgtggtggtgggtggtgggcggggtgggggggcggttaggtttactcaggatggaggtggctacagtaagacgtcacctcctctgtgcttcccaaagttgcttcggcttccagggtcacctgcctaaaacctggcagcccatcaaggcagaggaggtacaaggcaggagaggtagggcagcccggttcctgtgggtcggccaggaacaagcccagccaccataaggaacaggaagagaggcccctggatgcccccaagaggctcctctggagcctgtctttgggtctagagggagcagccatgagccttgggacccagcacaggggctgtatctaggtgccaggggtagcagatcagcagaaacttccaggagtaaccaaagttgcatctgcagtcactgctcttcagaaacagctgaccagggtccctgaggacacagttctcacattctgggcaacaggggaagggatggcccatgcctccaggacctagcaatatccgcaataaggggctcctgggcaaattttgctggtgacacaggcacaatgtctttgaggatgatgctacaaggcctgccctctaggacggcacagtgcaaaagaaatagaatgcaacctctgtatgtcattttaaattttctggtggccacattttcttacagtaaaaacaggtgaaattaatgttaataataaattttatttaacccaatatatccaaaatattacttcaacatgtaatcaatataaaaatattgttgagatactttatttctttttttcaaaatgcagtgagtatttaaaatatactgacaatataagtcagttctgaatagcttggggatagtggctacttaattggacagcatggctctggaaggtcaagtcagccttcaccttgacagtctcatctgataagtgggcatatctcaaagttgtcaggtgtctgaaggctccaaatgtgacttgcagagctacatggacaggtgcagaagcaagggatttcataagccagagagtgctcactggaccccacaattccctctcaacaaaaccaggcttatgctgcattctagtgaaactttctctggttggggagaccctgtggcactggtttcgtggctgccctgcagaaatgctctgctctgagcctgggaaatggagctgtttgaaatggatccaggttttcagctgcctggtccctgcaccccatctgccaagcaccaggagcgaggcagatgctagaaacacatctgtcaacctgccctgatggtttctggcacttcccccagcctttctgagactgtgtccccaccctggaagaagccagcactctctgggttttcagttactggtacccactggagggcaaactggggcatccctggatgtggcttcctcagaaagtggtcccccgttctcagggactgatagctctgtctgctttgctgcctcccacccctctaacacagcccctctctgagacaggaagtagggtgtaaacccagcagtccccacagacacagtgagcagctctgggaaggtctgcatgggctgcagtgaagcaaatcccagcatggagcaggccagtgcctgcgtggcaagcgaccaaacctgcttctactcccgctctgcctctctccccgataatatgagttgttttgaggatgagacgagaatatgtaaacaaagttcctgacaatcagtactcaacaacttctgggtagaacaagaccgagagctaacagggaaaagagaggatgccttaaccatggtgatggcagagctagactccaggtcagtgtctgttgtccctcatctgggccattacaggtcaccatcaccgggggttcctgaatgatttcaacattacgtagtttaagagggaaaagtcagtccatctggttgtgtatgtatgggcatattttatatgcctgaaagtcatgagttagaaaagcttagagtgtctgactctcctctgtcatgccagctcccaggtcatagcctggatcaatgtaggtgctcagtagacacggttaatcagacaagagaagaaaggagtgagaaaagcggggagggaagggagaagtcaagaaaatgtgatgaggggtataaggggtaagcaacaaagagacagaccagaaggaagaggtggaagaggtgatccagggtcggagcttcccgctgccccagccctgcctctgcaaatcgagctcagcccacttctcccaaaagcatctccgtggctgggcgcagagggctgggcaccctggcttgagctggaaagccttttgccaactccatttttcctcttaaaccatgaaggagtctaaacgtcagctaaatgagtaccccatatgtggaaatattcattctcacattgatgttttccttataaaagcacgttgttttatgtgtgggtggaggaactcattgtaaactgttaaatatgatgtaaatgctaatttctctgcaatgccctgtaaaggaactccctgggaagtgtgtctagtggaagaccataaaagaaaatggtaaaaataaattagggagaaacgcgggtggtagcatacggtgtctgttttgccaacacgcagccgtgtgtcccccctccaagctctggccctaacaggagaggatttgcataactgcagtgacagatgccaccacttccccacagccacccggccttgacaacttttgggaaacattctgccagggtttgcttccaataaaaacaattcaaaaaatcaccaagcatttctctcttttgcaatttttaataaaattacggtttctagaggtttggatttcaatcctgaaaagaagaggcacaactgacatgatgcaaatctgcctttaaaaccaacctaggtttcaggttgctcacccaggcttgcagtaataaccttttctaaaaacctccgatgcactttggccacattcaaaagagagaacatggcaggtgtctggcgaacacaggcctctttctccatcagtagcctggccagtcttggcactctgttaaccaaacccagctctggattttaaccacaacccaaattttgtcacacacaaaagaattagaattcagggtcacacagctatttgtggaatgaatattagtatattctttacaaatgcatgatgtatgaactgcatatatttctttgataaattgtttttaaatatttcctcctttttattaatcaaagaggaacctcgtgtatcactgccattttttcctgtttttcacataaattattttcttgcaatgttcgtttgtattattattgccgatattaagcaaagactttttttgccttgtaaacaagattttgcttacagctaaatgaaagaagtgaagttaatcacattgaaataataggtttaaaaaggtaattcagtggtgtgggaatgaagtttaatcttcagcaatagaagccgtgctaagagaaatggcagaaaagcttgttctgtaattaaatggtatttatcacaggcaggtcagctctgctgggtgagaggctccaggacttcacagagaagaggaaggcaactagggcaggaaaaaagggcccagagtagagcccgcagattccaagagcgggctgggaggaagagctaggtgcagtgacacctcctggggtccagctgtctaaccttgcacatgtgtatctcagcccacagaaatgagtctggcaaaaatgccaagtgcatcctccacatccttccagaagggacccgatgtacagcttccctagtcagcattaaaccgcacgagcttagaatttacacagacctgggaccaaatcatacagctggtagccccactttcttcatctgtaaaatggagacagtaatgcaccaatctcctggagttgttatgacaacttgcaacacaagacgtaatgtgccatgtaccatgcctggcactgtagcaataatcaatgctaattatagcccactaattaggattcagacctcaggcaaagctagtgcaggttgagaatctctagcccaaagaggaaaaaaactgagcttctcaagcagatgtttctcaggcagccttctgcaaatgtggccaaacttgtcagcaaagcatcaaacctggtataaactgagggcatcagcctgcagctgagaaggctgtgggctgatttcaagatggttctcaaacagccctctgcaaacatgttcaaccctaataacagagcaagtcagtgagttgagccccatcccagatttctctttccagaactctgatttcctctgggagctggaggatatgaaccccagatggcttcgctgggctcagaccatgctgttcatccatgccttccatctgagttcaagccctgaatctgccacttgcaagggtgtggttttagataagtgagcatagaaagtgacagtactgggtggagaggaggatggagttagataattcagggagtctttcatgctgccaaggccaagccctttcctcccacgctacagctctttgctagctgctgcctctttcttagaggcttttggccctttcgctcacacccgagctcattgatgagatcttcacgccactgtgcttcaggaagaccaaaagacccaatgcagggatgtctcactttggggaggaccttcttgtttttaactctggcctgcctgtctatcagggcatttgctggcaggaaattcaagcatccctgatcccccttcaatgaaccccatttcagtagggcctgtttggcattcataggtccctggggctcatatgctgttgacagacaccttaaaatcaacctaatcctcaattggcccatgtgcaaaaacataccagggcattcttcaacatcagggcagctgagcctggcaccactccagctttcatctctaagaagctcgaatttgggtcctttattagctctcccatctttattagtgtcctggagcagagtgtctgcagctaaagttattgaattttcactaaaacctcaatacatgcacgacccttttgtactttcatgttcaaaaaggtacagacttccaaccgccatctcctgcctccatccgtatctttcctcattacaggctgcggtccaaaaccaatacgaattaaataaatagcccactgagagctgcactttggagaattgtctccttgctgtacagatgtgtgctatctccaaacagcaccaacatcttgtattttatcttatatttgaaaaaaaaaaaaattaaaatccaaatagtatccagggaggaaacgtttgcatgggtgaatgtttcatttcattcttctcccagcgtgccctcctctttcatcccataatggctcttctcggctaatctgtcttgaaaacctgcaggtagagatgtttattgatacaaggctgacatgcaactcagtttacagagactattgaaagtgcataaatagtagatttcacttgatgtctacttattaatgcaattccactctgaacatttctacagaaagaggttttgccagatgggagataagtcttatgttatggatattcatgcaagaaaacatttggtttccattctaaatgtctgatacaggctgtccccataattgcatttttcagggcaagtcaccaaattcaacatcaattactttgtcttttagcagtttaagggaaaaaagtttgggttttttgttgttgttaaaaaaaaatcactaaaatctcatagaaacatttcagcccaccatttcatatgaacacaaccaattacttgtgtaattttacaagagcagctttaaccatggttcacacagaatcatcttgtgccctgaaaccacaaatttgacttcccagcagctggtaactttaaatccttaacataatacccacagacatttgttcccttagatccacccaggatccgatgttgctggacagataagcagagtggaggaactcactttaggcagattgtggagaaatatggcaggggagtccatgcactctgcaaggcctttatggtccatccatggaactggaataggaaatcaatggctaagtccagactggggcactgaattcttccacgtaatcattttttccttcctccagtccccggcccctcctctgttgaagacttaacatcgccttgctcatttagagcataattgagactccacttttatttcatcatccttcccctttcattgatcattgctaattttctggctcagtgccatccggggaatgggtttcctaaccccagcagaggtgcaattggagtcatggaaataaaaatgggtttgtactttgtctcatgaaccaagtcagctgatgtgaggagctgaccagggtactcagggatacctcctacccgccacccttctacctctgtgccagcccacccagacttaagaaaatatctccccagcaccctggagcctgcctggcatctcagagcatgtgacctcagcatcttctgccatgtagataaaaacaccagcacaataagggaatgattcctcccccacaggtgcaaaaaagagtggatggccaagtgcagctgtacctccaagtagccagatgtgaaaacagtacatctgtctgcagtttctctgttcaaactgaatcactgattcttcactcatgcctgagaacatgtgccaaggagagatttagaaccacagagtccccacctcccctcctccaggcatatcaggatgggggcagggaaaatttataaggtgcgtatgtcagagctttgaacttaggcaagtgtaaacccagaaaaaagaaggtagcccaccagaaaggagcagaggggaacagtacccaacacactatcccaacataatgtcataccatccctggaggggaaaagaatcagaactgtgagaaatgtgatagaactgtcaaaattatataaaatcagcttcatggattgtgaaccacaagtcacacttctatttgttctataacacagtaaagattgcaacatttccatcaagatatgaaacagaggcaataatagcacagaaaaagacctatcaatgcgatattcaagttatctgtacactcttacccatttctttcatctgatacctaggaagcctgctaccaaagtttgaaaatccaaatcttgcaaagtatttgaagatttggaagctgtagtattgctggagtcagttcatatcagctcccaagagccaactgttaacgttttcaggaaatttgcaagctggttaacatcatgttggtaactcacaaagtcggccattattagagtatttacaccaaagaaataggcacatgctatgaggacttttcttttttcagagagctggttgttaaccatttactaacatcattggttagagggctctcctgagattggtcagcatgataattagatttagatttagctccatcaagttctctttcaatgctctcgaactgcttaagcccatggttttctaactgccaacagcaagtatcttgcactcccagaagtgcctaaggataaatggggaaagaggacaaggtgaagaatgagtcttatacacacccctgacttaatagaccatcttggctttgagctgttagagtaggtctcactacaagttcccttttgtcaaagggctctgctgctctaaaagcttagtttaactgagattgcttctgtctgtttaactgagatgtctgtctgtttgagtcttcagagaggggagatttatgcaaggccacacagtgagggcaaggctgtgggagaaggactcggcatcctggacccagcttcccctggactcgttacatgaccttagacaagcccacttttccttttctctggtgtataggtggacttggtgatctctctgggcactgttggctgtgaaattctgacattcaactctgagttcttggtctaaatagactctcgagggagtgtggataatttaagaaactgaaagacaagagagacagaccaatgctatctgatttttaaggagaaaacatggagcgatcatcttgacccagactcctgaagtccccagacctgcttactttctagatgattcacaagcccttgggaaaggaacatcaggaatctacttggattctgcaggaacaacccagccaggccatgagttgggacatctgagtcatacagacctagatccaagtcccagctcctccacctacatgctaagtggcaatgggaaatttacttaacctttctgatcttttgattcctcctctgtaaaatggatcataataacacccactatctaagacttttgctaagaattaaatgaggtaagccacggaaagtacttagcatcacattagtccagactaaacactcaataaagagcagctactaacatcattatttcctcaggtgatggggctaaatttagaggccagggaaatgaaacagacttggaatttgcactctcagctttgacctgcgttgaatccatgtatgggactgagctgggcctgggcttctaagacagattgctgagtggactgtgctcagagggaaatttttggggtagattagccaggaggcgattttgcacaagtcagtttgggttggaatcagttaagtttctttttatttggagtgaaaagagcaaaaacatacactcgagaagccacgatggactattcatatcctgggcctgggccaggaactcatgcccaggtcctctagggagaggcctcaggaagagactagtgaggctgagctctcaacagacttgctgagacccagtgcatcagcagcccttgtgacaaagtgtgaccccaagagaggaagcctggacttctcacttctgcaccagacccaaagcagctttaatcaatggggatgccaagaatggtaccaaagtctgggatattgcacaccacacagtgggcatttgctttcttgcagggagcaccagcagaggtggaagtagtgaggttccctgccgtgatctttgggccgcaggggtcagcaagaaaagaggagcaggagagaaagaatttagcaagtgctgctgtgtggggaatgagatttattcctaaccatataaggggctccacaacaaaattgggagaacttttcataggtccataaatggggctagaacaagtaaaacttggatgatttttgttaatgtgaccctgagtttaaccccaacctggggttccacattttggatccagaatgaagcatgcatccattcagcagaaatgctttcaagatatccttgtagacaggtgggaaaatgtaagcttcgaggtgggtccatgactcgctgaatgtacctaaaaggagagtcttatcttggtgcaaaattagaatcacctggagaactttattttttaactagagacagggtctccctctgtcacccaggctgaagtgcattggcaagatcctggcttactgcagcttctaactcctgccatccctccaagaagtgcaaggtcttaaccagatcctctgactcttaggctgggcctcctgactccacagccccatggctgtctttcctgagttataggatgctctagactgggtatcttgggtagaaaatgaaccacaggactttgaatattgcttccatctctgaatgcctatgctgcctcagaggctgaggctgccccagtgacccacctgtccccaggcctggctcccaccaaggcatgcccacttcctgaggccttctctcaggaaggaaatcccagtcatcataaaaggaaaataaggaaataaaatcttaatgggatttcataggtgatataaaatctctacaactctgggtgacagacactaaaaaagattatttagagagaaaaagctttctaagacttcctgtggaattggttatctgaataagcttgcatggtagtcatatataatgtcagtggagggagggccagaagggtctgggctgactggggcctgagatccagggagactagtttgacccactgaagaggcgctcagagtcatgaggcaacaccaagacatacagtcctgtctgccttatgaccttcgccacatccttcaggccttgactcagccactgcctcttctggaaccttccctgaccccccaatagattatgaccctccacttcttccccagtattcctgggacatggttctattatatagcagtgtttttcagaatgtgtccacagaacatcagcattggtattgactgtgtgtatcttgttagaaacaggctcctgaaacccacacctagacctgccatttcagaatctctaggggtggagcccaggcatctgtatctccaacaagcttcatgggtgtaggtgacattttgttgagatctgggggcaagaaggagctcatcctgtgaagatctgggagcagacagagaatggcaagtgcaagggtcctgaagtgaaaaagcatttggaaagtctgagggacagccaagaagatagtgtggctcaagagacatgtgtgaggggcaaaagtgggaggagttgaggttgttgatatatcaggagccagattctggggggaagagtttagaccttattctaagtttaatagaaagccacaaaggcgtctgttgaagactgaattattggttgcaattcttttttttagaaatggggtatcactggagtgcagtgatgtgatcatagctcactcactgtgacctcaaactcctaggtacaagtgatcctcccaccttaaccttcctccccttgtagctaggactacagatgtgcaccaccacacctggctaattggtttttttgttgttggtttttgtttgtttgtttgtttgttttttagaaacaaaaatcttgctatgttgcccaggctggtctcaaactcctggctgcaagttattctccctccttggcctcccaaagtgctgggattacagagatgagccaccatgcccagcctggtcccaattctttatcccactattataaattatctctccacacatttgctatggcctcatggtgatgaagtgtacttcctttctctatgactttgatcttggccgcatgacttgctttgaggaaagggatggtggtggatgtgttgggagctgaggctcggaatgttcttgcacaaatgggctttccttctaatgttcctcttttttcaccaggagtagagaatgccttaggtagccattgatccaacaaggatgggaaacatatagcgttaagctggacccaacctgcaggccagagccaaaccctacctagatcagctgaacctcagccaaccctcagacacatgaacaggaaataaatgcttgctgctatacatcactgagttttggggtgactggttatatggaattacttgaaaataactgtgtgataaaagctttcaacaaaggagtgatttgatagcctttttgtaaagaccactctggcagtggtgaggagactggattgtgaaagactcatggaaatgagaaaatgagcttgaagcccattgcagttgtctgggttggatcccacagtgggttcgactgtggaggtagtggtggagatgaagagaagcgaatggattctagatgtatgtgggagataagagctgacaggatttgctgataggctgagtttggggatgtgaccacaacattatgcaatttcagaaggaagcacacacaggaagtggtgcaatttggcaccactggatacagtgaggagagaaatggagatggatgaatgtcttctagatttttggcttctgcgactgggaggatggggggtcatttaccaagagaggaagacctgggaggaagaaaattgatgagtgtgggtggcgggaggcggggaccaggaggaccaatatctctgttttggccatgctaagtttgaagtgtccattgaatctaaatggagatgtcaagtaggcagttcgatatatgcgtccagagctcagtggagcaatcagggctggagttataaatgaatgaaccaacatttgacagtggtgtagcatgcctttgctcaggctgttccctttgccacatcttccctggccacttagctcctatttctgctttaagacccagttcaaacatcacctccatgcagagtttgtggttctcacctctgtgttcccagagttcactgtaaatatctcacatgttccaaatagcctgcctcccccactagaccacaaactctgagaatctttgtattcccagcacctaactgaatgcttggcacatggaagatgctcaataacatcaacttccttccttcaaggcattgggctgggtacttataaaagcaatgctccatttaaacttctccacagtgcagagggtatgttgtcattccatttcaaagttaatcacactgaggccctgagggattaaggtcctgcccaaagtttctgcaagtggaagcatctggatctgtctgatttcactgcctgggctctttccacgttgcctctgccccactcctgcctcccatcccctccctcctcccactcccttgcagccctcctcctccctggcagggctcccacgctgcctgcgcctccacacaggatgtgcttcctgaagttcctggtccagatggcccacggaagctgctcctcataaatcaccaggcctcgcagagctgtgctcagccactttctcctctcaatctccccaggtcccagtgcgtgggccccatctgcccagtcagcagaactggcttctctagactggggagcagatctatggtccccctccccagcagggccaggagccatggagcagattcctgagagctgatgaggggactcacagagcatctttgttagggactaggaggtgactaaataagatgcacagtgcttaaaactttgcccccagtggaggtgcaggtgcaaagggttaagaaatccacctgccagccaggccctatcaccactgggtattcggacccctttgctccctaagacaccatgccacagggcaattgcatgcttggcaccaccaagtccccaaatacatttcccaatacagatcagcagcttcagtgacaacccgctcgaggcccagcacaccttggacaagtcacttcccttccctgaactttcattttttttatttgtaaattgcagataatagtatctgcctctcagctatgctaagaagtcaacagacagtgtttcaaaaaggcacatggtgagtccccagaacatggtaggaatataaatgcaaggcacccttgagtattgccctactcaaaaatgggccagaagtggggacaacagggacctgactccctttttttttattccattaccaccatctccttaatgtttccaaagcacagactgatctgatgtgtccctcctctgcctaaaaatcattcagtggtcctgatgtcaccttaggcagtaattctccatatcttcttttctgtaactttaaaaactacagtttgggaccatatacttggaggctgtggcaaagttggctagctgcccaccaaaaatgcatgctcctgttccatggtacgaggttgtcagatcatggttgcccaatcggaatgacactttctagcctctcttgcactagacggaaccacatgactacttcttatcactgaaacatgagtgaaaggtatatgcctctcccttccaagcagaggtgcctttgccccaccttctctttccttgtctgctagctggaagaaaggattctaagttgcaagaacttggtggagccataaaacgaaaggtgcctcaatccatgaatggccctgtggaacagagagccagcactgtcaattgagtactcactttctgcacttgaaggaaaattttttgaggccaataatattttacactttatctgtgacagcagctagcattaccctaactcaaaggagttaaaagattcaaaatagcataaaacaaatcaataataatgatggtgcaatcatgactatagtataacagtacctcacagaatctataaaggcacatacctgtgctgactatttaacagagacctatgggtaccacatatcaatttgagtagacttagtgccctggtcttgctccctatatgcccataaaatgccacccttgactgttctactaagcatgcctctttgcatcttgtcacacaacccacccacccactggtagcatcagcctgatttccatctgggcagtcacgctacccctattcttagtctctaggttccaataggtctggcacattgtctaagcctggccaatcaaagttctactcacgatagcagtggctggcctaggagtgggcacataccctacagccagttgaatcatcaattatggtaaatagcaagactttgtccaggtatgctgggggaaacacaattactcttttctgctatattcaaccctagaaaaaataataacaaccatgttgcaaacacaaggggagagcctaagggagaatggtgccaaaatggcaggagacaagacctaaagagagagagagagaaatcaatccccaattacatcaaaccatggtcttttcacttccagaaatcaatacattctcttttttcctagctccaacttgaaatggattttctgacccttacaatcaaaataatcctaagtagaactcaggtgtgccagcatttgacagcccaaccctgaaggattggaagttccccaacaggagagcctctggcctacatggtacaatttaggctgagtcctgcacccacaactcccttaccagcccctgcatcctctccccttcctccatttgcctgtcccccatatcctcttcccaatctccacacaaatgatgttgaattcccagaaagtagagatccttctcctaccccctgtctctgctatttgtttccttacccaccacctttgctcaactacccataaccacttctcagcctccctcaaaccttacctcttctgtgaattcatctctgaacagaaatttgttttcaattaatcaaattctttttctctcttttttgttcaaatctatgttggttctctaccaaaacagatctgatctttaaaaaaaatgcccaaagagacattggccaagtttcagcatgaggtatcactgaaaccacttcaggaaggataacaccaccacagacttcctgggaagaagagatgtaaacccacctcagaagatgacagcagtgaagaaaatgagcatcacaaactggttcccaaggcctgggcctgagaaacactcaggagagccaattgctgaaaaaataataataataatacccagagagaggaagccttttcttcaggaggaaactgactcacactctctgccctcagatcttcctgttctcacccttacacctccactccaactacagtgcctccttgctgtttctcaagcaaccaggcatgttctcacctcaacacctgtattggttatttattgctatgtaacatacaactcgaaatagtagctgcttaaaacaagaaactcttttttaaaaaacagtctcagagttcctgtgggtcaggaacctgggagtggcatagctaggttattctggtcccaggtttctcctaagattatgcccaaaatgtcaatgcagttatacccattagaaggctgggggctctgcttccaaggtggcccactcacaagcctcagaagttattgctggctgttgtcaggaggcttcagttccttcccatgtggacttctccataggactgactgcttgagtgccctcacaaggcagcagctggctttccacaggatgggtgatccaagagagagaaaggctgaagctgtcatctcttttatgacccagccatggaacccatatttccacaatatcctattgggtacacgttagccctattcagtcaggaggggactacacaagaacatgaatactggagtcattggaggccctctttgaggcttaggaccagtgagactttacacttatcacttccgctaccatcctttccccagatatccccatggcttcttctttttcctccttcgaatctttgctcaaatgtcactttttcaaaaagaccagccttttaaaaactacagctcctcctcttgccccagagcattcccaaatttcctttcccaatttattttattcattgcatttatcatcaaatacacacacacacacacataattttgtgtttttgagttttagatttacagaaaagcaacaaagatagtacagagactcccgtatatgtttcacctggtttctcctaatgtttgttctggttgagtttttttgttattgttgttttgttgtttttttctgtcttcctccattagaatataagcgcaatgaaagcagtgacttttgcctattttattggctgatgtatcctcagtgcccaaaacattgcctcactcacagtaaacattcaataaatatttgttggatgaatgaaagactatattaccagctcaaagaaaagctgacacttgccttttgaccttgaagttcttaacagaaacacacaggatatttaacataggatgacccaggggatttaggtagagtatttaaaactcagcagggaaaggtttgggtgagaaagtgtacacctaacttgtcgtaaaacaataaacttcatttattaattttcatttttctctctttgctcttttcagtatgatttgctttactgttgataaagtgagttggctttatattgtgtcaataagcccatcttcatttatcaataacacgaatgcagtatttccctagaagaggcttaactgggctaagcagcgatgagaaaggagagaggatgacttctgaaaaatccaaaagaatcacagactctgagatttccccaatctagtggagttttcctcagttccctgctgagccttcccttgtagggcttcccatctggaaggctcctcctctctctctttattcgctgggaaaattatcccaacaaagcaatcacaggatgcatgtcttgtttcctttgctggggtcacctccaccagggcttaatagccttggtgaattctcactgatggattgatgttggcccctggactctgagcccctccaggccctgcaagccccattcctatgtcagatccctgacagctcctaacccatccaatgctggggcaattggctgggggtgaggcagtgaatacttatcaagcacctgcaataagcccagcactgtgatatgtactctacagatatttaactccactgagactcagcatcacagttaaaaacaaggggaggtgggtggccttgagtgaggcttccagagttcaaaaataatagttcctacttgaggactaccatagagatcaaaagagaggaggcaaagggtttaccattatgcctggaacttaaaaaatactccatcgtgttattttcaaacaagggcattttacagatgcaaaaagtggagctcagaaaggtgaataaatatgactgataaaatttaggtccaggtctgcctaggtctaagtccttgcagtacccactatattagtgtcactcgaagaatggcatggagatatttgcattagaatcacatgaggagctggtttaagaagcagaatcccagacgtccagaactggaacccctggagggtaaggcccagggatctgcatctttcaccagctccccatgtgacctaatgtgcacgaggccagctcacctctcttggacctgacacaagccagggatttgtgctttggcccctctgttagttcaaatgcaaggcatgggcagcattctctgcagctttctggggcccagctaaggccattatgaccctggactcatgcatagcctgaaaggcgagtaaagctgtgttcctttggatcagggcatcactgagggcagaaaaatgggtctcgggtctcaaggaaaacaagcctcagctgggagaagaggatgaatcaaaaagagaaaaccccacctaattctcagcacagggcagcttgctgaacagaaatgtctcattgtgccccactgtgaagcagtggacctccatgccacataaagtattttggtacctctctcaaggtactgtagaacttgaaagagacttctttgaagcttctgtcagatgacaggcagagctgagtgtaacacatacccatcaaacagaagggactcgggttggacctggaagagcatttggggaacctttcaggggctccaaggctggcaggccaggaaggggctacccaccttccccacagtggtggttcacacagccccgcccagacctcagctcttgctctgaaccaagaactatccagggcatttcacatatgagacctcaggtaactcacatcaactctgtggaacatcactatgcccaactgacaggttgagactttaaggcttagggagatgaggtcacttgttcagagtcacacagcagagattatggagctgggattcaagttcagtcttaaatggcatctgccctacacagagggctacaagcaacggactggcagggaggggaagaaggcttggccatgtgcccctaaggctcaccattcaggttcagctcttggctcctgatgctctctggagtcccccaactgggccagtctcccaggcaccttgactcacccctctcagcacttgactgagcaaggtcctttcatattttaataacgtgagcaggaagtacagagagtttccatgtatctcccacccccttaataagcccaacgtctactactgacatcctacagcacagtgatacatttgctacaattgatgaacctatattgacacgtcattgccaccgagtctgtagtttacatgagggttctcttttggtgttgcatatactgtgaatttggaaaagtgatgtgtatccacaatcatagtatcagagagagtactttcactgccctaaagctcctctgtgctctgcctgttcatctcttcctcccctaacccctggcaaccactcatctttttactgtctccattgttttcccctttccagaatgtcacagagttggaatcacattgtttgttgccttttccagttgacttatttcacttagtaatatgcatttaagattcctccatgtctcaatggctccatagctcatttctttttatgactgtataatattccattgtctggttgtaccatagtctatttatccattcacctactgaaggttgcttccaagttttgctaattatgaataaagctgcttttcatatttttttaaaactttattattattgtcattgtagttcttgatatcgttaatgcaagtttacaattcagattaaataagaagaaaagttcttaatctctgctactccaaggattgctttatcttatatttttttaaaaatgagattatacgataaatgttattttctaattatttattttccacttaatctgatgtggaatatgtcacctgtctcaaagacatggtccaacttgtaacatgtttgtggggttctggagatggctgtgtgacttattcaaccagatcctttctgatggaagtgcagattgttccagatgacttacacttgcaggttctcatggtgaggaaagttcccacactttttcaacccagctacgcgggactcacataggccagcctagcccccacttccttcccttctcacatgaagacttgggaaatgttaagggaagaagagggggtctcaggagccgaggggctggcaatgcggatgctgctgatgtcaagtaaaaggaagactgaacaacacccatcagatttagtggcccagagttattcttccatgccctcacctgacctcggggtgaggcatggaattccagcctcctgggggaggggcagcaatgggaaagcccaagggtcatcagaattgctacctatctggcatatgtatccttgccctgatgcctcacacccattctcagttccccaaaaacagccctaccggtagtttctgttcttcccattttatatacaaggaaattgaggctgagaaacctcacctgaagtcaagtggccaataaatcacaaagccagggttcaaactcagttgctcagggcccaaagctgggtcaattgccccaaccagagagatggcccagccagcccaccccatgggctaaatgacctgactgttgtctgagaattagctgattcccattcaccagagttctcaaaaccaccagcagtttctgcattggttattttgctgcttttttcttttaattaaaaaataatacagggctacggtttaaaaaacatttaaactggagagaaaagaagcaaccctcagacccattctctagaggtaacttatgtgaccaattttgggggccatgatgtgcatttcatacgtattttgtgtgcacgtgtgtatgcacacacatgtacacacatacaataactgcactgcacaccccctattatagccagcctctatgcactggatgctttcaagaacattgccccatttcatcttcatcagtatgccagggcctggacactattaccttccccactttagtgatgagaaaattcaggttctgagaggctgagccacttgctcaagctcactcagctagtgagaggcgagactggaattcaggagcaggcttttcatagcaccttcctgcctataaagaggggtggctgagaaaacccattccatgtccttgaaacaaaaggctcaggaggcccagactgggggatgaagtaatccctcaacatctagcaactatggggcacctactgagtgtcaggcagtacattgcctggacctcggggatctcatagtaacagccccaagaaagaccatcctgagcaagaggcacccctggcctccccatggcccagaaggatggcttgcatggtgacaacagaggcagcaagaggggagggaaatgggtggcagctccagtggacacaagcaggagtctgcagagcttcctgggaggggtcccagggataagacccacacagtggtcccgctttcagtcatttcttccttccaagctctcacaaaagtactcgtggcagatctatctgggtcacaggacagaaataaacatcatttgaataatcccaggctgacagccttggagaatggacaggaaaattagcccctggaaaaggcaaatctgagcatgtcaccagaggcaccagagggtgtctcagtagcctcggtgcctcctgggagcgctcaccctcacccaggcccttggctcaatgcccgagagaaggagacagcaaaatgcagactcaggagtggaggcccacgacatcagccagtggcttcattgttgctatcaaagaagacaggattcgaacccaggtctctccaacctcacctcttcctcctgtctccttacaggagccatctggagttgggtggcccatctcagaaggagttggatgtctcgcttggagtctccatgacaatcaatgactcccatccccagtggcaggatggcttacctgagccagccacacattgggcgacccctcacttggctggcatcaaaggtgaggttgctttccaggtagaagggcacagccagtggcaacgaatgcagaaaccaccattggtttcaagaattctagatggtggctgtcagctgattctcaaaaaacaatcaggtcttttagcccacagtgggggctggctggactacccactatggtgccacaaaaagggcagactctggaccagacatctgaattggagctctagctctgtctattcctgtgtctacctgggaagatgatcagatatctctgagcctcagttttctcatccgtaaaatgggtaagagtaatctctgcctcgtgggctgccaggagggtcagaggacatggacctaaatggaatgaccacaataggaacagaccccaaaacctgtcaagctgagccagggggtctctacccttcctagcttctctccctgtttcccaagctggctgggctcgaggttgtgctggccgagcggaccaggcacaggcatttttccctcttgctgagcaatgcggattgcgccaagcgttccctctccttttgtgcatgtttttcatgacccgctgccaacagctctttgctgggcggctgccaccatttacccagcacaagaaaactgcctttcttcccccatttagggtctggttttaatttctacagtattctctttaataacaatgcctaattaaaacatctgttaaaaagtctgtaacattaactttacagggagaatttaatagaattatattggaattgcaggcatttaacggccttcctaattaggcttttctttaaaaaaaaaaaaaaaggaaaaagaaagaaagaaacattctacaaattaaaatctcgctcttttttatgataatgtaggctgatggtccagtggctggagaggacaagtggaagcagatagagagacgggagtcatgctaagccagtataatgacctttgtaggatggagaaggaaattggagagaccctgcatttaatgacaggcattgtaccaagagcactctcatttgtaatctcaattacttcctgacaacagtcatagaaagtagtattcaccccacttgaatgatgaagaaactgaggcagagagagaagtaatttactcaaaatcacacatgcacacagctagaaagtggcagaaacttcaaagtatgtactcattccactgctccccacagccttccagctttgcatccaaagagttttctagagccctcagtggggtctttgtctccgatttgctcactgcttggtggtgagcatcatggctgcctcccataatcatctgtagcttgtccccggtttctttctacaaattcctcgtcagcttgatgctcctacctgatcctccctggccctggctgtcaccctacacgccaccggcagcaagctggagcatgtggtggagtaggaatacagcctagtgcctgctggggcacaccccacaagggaggagtcaacagaaaaatgtccaaagtgatcatcctcaaagtctggtccccaggccagccgcatcagcatcacctaggagcctattagaatgcaagttctcaggccccatccagatttactgaatgagaatctccgaagctggggccttgcaatctctggttttctgtttgtttttgttttgttttgttttgttttgttttgttgttttgtttgagacagagtctcactctgtcgcccaggctggagtgagtgcagtggcacgatcttggctcactgcaaccctcgccacctgggttaaagcgattctcctgccacagcctcctgagtagctgggattacaggcacccaccaccacaccccaccaatttttgtatttttagtagaaacagggtttcaccatgttggccaggctggtctcaaactcctgacctcaggtgatccgcctgcctcagcctcccgaaatgttgggattacaggcgtgagccactgcgcccagccacagtctctgttttaataagctttccaggtgactctgatgccattaaagtttgagaaccactgatctgaagataaaggggaacttttttgtcccttaaccctcccaagctagacttcagagtctagaggtttggcactttacctttgtaatgtgcctttgtaggatggagaaggaaattggagagaccctgcatttaatgacagaggtttggcactttacctgccctgagaggcagccttgccctaagccattgaccctggcccagtccctgccaactatcacagaggtaaactccaagcagagctcccgacttgaggctggcctgctagttacaggaaacaggtgggattaccatctttaggtagtaggaaagaccaaacccaaatgctttcctgccgcttcctgaaaagagccccctgttcccttttagccaaatctgacctcaacagtgctccccagagtggggtatgggaggtgaagccagcctaggctactcaagaaggggctgagtcacccaggaaggatttaagcagaaactcccaagctcaaggaaaggacttttttccagccatggttttaagattccagcatggccctgtctgtttttaactgacctaccaagccctggggtggatttaaagataattcagcagagtaggggcagcagacagacagttcccacagcaggttagtgaggccctcacagatgatgtctttgggtccgtccccagcggttgtgtgagtggcttgtttctgtcctgatgaagcaggaagttgggtgcaatgaatagagcaaggatttgagaatcagacagaactgagtttgaagcttgaccctcccatacattggccacctgactttgggtaaatggcatttccttgctgagcctcagttttctcatctgtaaatgttcaaggcacagagctggtgtcctgattcatctggttttaaatctacaaagaaatcagaagcaatggagacagagatggcttaccatcctttgtcctcactcaggggtccagcatgtctgctggaggtttggaacaaacagttatcacacagatcagggaatatggccttttctgctaaaacaaaacccgaactttgtggttggggtctgggcgcagagcctctgggtgaggagtggctcctagaccacccaaccctaactctgtcccctaagtctctcctcctccttaaggatttcacttggattcctgctcccaccatcaagcaggtttccaagctctgttacccgtctcctttgtcaccacagcctagggattgccagttcccttcattcagctcctctgacatacttaggaattcttataagccttccctaaacatcaaggaaggaaaccacaagaggaaaagaaaacaagaagaggaaccctggagtaaaattgccctgctatttattggctgtgtgacctcgagcaatttaattaacctctctgagcctcagtttcctcatccatcaaatgggaacaatcacaagatgactaactgtggcattgctgtgaggattaaagaaactaatatttgcaatgcacttggaagagtggccagtacatggtaagtgctacagaagtatttgttctataaataataaatgaaggcatgaatccagtcacgctcccaactctgaaatatcaaaactttcaggttcccaaggcttgaaattgccaccccagcccatccctatcctaggccctaaaatctggtactgcacagctgtccctggctggaggcacttcccatcacccttccatgtatagctgatctctcacatgggccagggcaaaatccccaggggagggaagcaggcaccttccacctgggccccatgtgactgctttgggaggactggaattcacagttcagtgcttgggcagattcaataggacagcctcctgtgtgatggcttcttctgttcaattactactaaaattcaccaaatggaactgagaggttttaacggcagtaattgtggtgcaaaatgctctgtaattggtctcacaaatgaaagtgaggagaatgctattgaaaacgaagctgccttgccctgaacagttcaagagtgatggcttagacatgctccccagaaacctgttggtcccaccctctcatgcctgagacccccgccctttggcctctcctggtgggaacctcaggcttctctctctctgtctgtgctgaggtacagtgatgggggacagtgctggcacgcccctgcagaccctctccaccctggtcatccctggaacctcaggcctgcagacaccaggaagcctgaaaggcctccttgagtggcctttttattccctgctgtcttacatgcgtataatctcaggcccccaggcctttgctctggccagtccctcttcctggattccgttcccctcactttccacacatagtcacttctcatttaacctacgcagtggagccatcctctccttccccagacagaagtagcaatgcctgccttctattatagtcccttctatatagcccagacactactatgaataatactgataacagttactctagtgaaggaggagaactgtagttcaacagctggtagcagaattcctctgcggcactgtgtctgccaacaattccatccctgcacacacctgctgcacctcccatcaagaaagcatgtctgttttccctccccttgactctgggttgctcctcagacactgttttgatcaacatgatgaggtgaaagttgcagtgttcccactccaggttagcctttcagaagcccagcagctttggcttttgctccctggtaagccagatgctgtactgcaaagaacttggactggatgcctggacgatgggagacctcgtggagagagggcatggagaatgaggggccatctctgacattccattcccatttaggtgctttgttttgcagcacaagctaactgatacattccactaaggagaaaccttttctttttttagcataacactctgatgaattatttagtttttttttttaagttctggagtacatgtgcagtatgtgcagatttgttacataggtaaacacatgccatggtggtttgctgcaactatcaatccatcactatttaggttattttaaataaaaggggccaggcgccatggcccaagcctgtaatcccagcactttgggatgccgaggtgggtggatcacctgaagtcaagagttcgagaccagcctggtcaatatgacgaaaccccatctccactaaaaatacaaaaattagctggacatggtggcacgcacctgtagtctcagctacttgggaggctgaggcaggagaatcatttgaacctgggaggcagagattgcaatgagccgagattgtgccagtgtactctagcctgggcgacagagcaagactccatcttaaataaatacataaataaataaataggaagggggacatagctaggatgtgcttgatattcacatcagtcacctgagatgttcgtgagaaataaagtgtcacagattcactcccagagagtctgattctgcaaggtggggtccagtaatctgcatgtttgacaaacagtgctgatgactgtcatggacacagaagtttgagaaccactgtctgggaaagaaaggaagagctgcatgggtatttttagatgtttggagaaggagaatgagatggccaagctgagaattccctgggctgggaaggccttagacctcctgagagcatggtgctaccaactgagctgggctggccccattgtgtgacccgccacactgcacctgggtctctattaaaagtcctcccaaacttgggaggtgatagatgtattcattatttgattgtggtgacagtttcacaagcgaatatctgtcaaaatttttcaaagtatacacttcaaatatgtgcaatttgttctaagttcattaatttcaataaacctttttttaagaactgttgcaaacacaactgcccttcatgaggggggctttgatagggtcacctaactggaacacttcagaaagtgagaggggagataatacaatgggacaacatgcataagccatgaccatccctggcatatctggacatttgatcaccctctgctttggggacatcagggattggccaggacaaagggaagaggaataaaggtgagaaatcagaaaaatcaggaaacaggagctagaggtgactaagagaagcaaggattgtaagaaacctgttgccagcactcactaactatgagttctcagtgcctatactagctcaggcaaacctcacaacagccccattttacaggtaggcaaacaaaggctcaggagagtgacctgcctaaggtcacccagcagtaaaaagcaaacactggatttgaactcaggaacactggctctaggaactgtgaacctcaccccttctgggactactgccatatgtgagtgagagactcagtccttcttaaagatcagtagaaatccataaggccagagggctgcagaaaccacacacagctacaacctctggtcacattcacattgactggctgtttcctggggttcccagcttctgctttcaggacagtgtcttatgtaattctcacaatgactgcagggcatacatttttattatcctcctcattttacagactaggaaatcgagacccagagaagtttgccccgaatcatccagctggtaagtagtgaagccaggttgaaactaggaccagaactagacaccaagacctgaagtttactgtcatttgaattacccagggatcttatttaaatgcagattctcatttagtaagtctgccacaaggcctgagattctacatttctgacatttttggttgttgttgttgttgttgtcgttgtgtttatattaaccaagacctcctggaaggccaggatttgtcttactcgtgtggcacagttcccctgtgttgcatgtgttagaaggaaggcctgggacccaggagcttcttgatgataataatttgatgcgaaggaaggaaggagcaaagcaagataagaaattggaggctgccccttcttgcacacctacctaacaccacagcttgtgctcagagagcacacgaaagaaaaagaatcacatttccagtattttcccaccactgttgcagctcagggcaggagcctcaaagaggcgagggaagtgaccaggggacacacagccagggcagtgatcggtgccaagtgttgctctctctgctccatggaggaagcccaggcactgattctcacccctccctgcgtcctgggccaagctgggagcccaggaaaggacattccaggaggaaatgcgtggttttcactccagtgcccctccatggaccacagcccttcccttccctcactctcaggtcctgacttctctccacgtggggcgacccaggtggtctgtggccagggaggctgagtaggcagcagggcccatgagaggtgggggctgtgtcaccacaggctgagaacacacacactcgctttcccataagaatccagcccagccactgcccaacccacccgccaggaccaccacaacaccaactttctcaggaaacctggatggggctgaggactcaggaactgacatgaggcaattggaggcctccgaggggggagagaggaaccacagttggtgttttgtggacggagtatgaggcgtttgctgatctcagcagaccaagtgcctcctgtccctgcagagaacccgaggggaggaactgacagcagggggaaaagtctgatgaccaaagtcaggacagagacgaagcagagagcccatagacaggaatagacatagaagggcagagacattggggccaagcgagactccacgaaaaggagaggtctggatggacagttacaggcacaagaggaagggaagatgggggcagagggatttatcaggatgggcattccagtcctggacaacactaccccctcttgcttgggcagaaattctggcttccacaccccagggtaattaataccttcttatgactcaagccaaactggcaaaaggctggcagatgaacggtatgtcaatgaagtgataatgttggtagagcctgggacacagtccccatcccctacaaagccctcaaagcaagtgagctggggctctcacgatggttcattgttttgtctttagggagtggcaggtgcctaccacccagggaatgatgagatgcggggaaacccagcccaaactggagcaggccaaagggagcccatctaaagggaatggaatagtccagtggtccctggaacttaaaatgggtccttccctcctccctccaggacccccaaccagtcccttctttctccaagaccgctgtcttattcttgtcacccaagcccgggaatctggcagccactctctggccagagatggaactgggaggcatttcctcaggaaatgaggcctcatggaaaagagtgcacaccacagaggatttgctttgaggagtccagaggctcttcctctgccacttaaaacacaaaggagaatcgcttgaacctgggaggcagaggttgcagtgagctgagatcacaccactgcactccagcctggcaacagagcgagacaccatctcagaaaaaaaaaaaacttcataatcaaaagcactctgaacccttccccagatgtcagcccagatcaactcttcattatcaagtacgcagaagaattctcgattaagcctaagctcttcttatttggctccatgatgccccaattatcacagcttggtacctgcacagggagctttgtgctggttctgaaaggcagagtggcctctctgagggtctcagcacaggtcacaggctcagtaccagccactgacccagcagagaatccagggaaaacaggccccaaggagcatggtcctcctcacatctcctttggctgggacctgcctggcgctgcctccccaaagccatccattatggggtaaggcttgtcattcacttcccaatgagctgcccacctggccagagtcaggtgaaagccaaagatgcagggaggagatttggaatggttaagtgcccttcaccactaacaaagacatcagggtctatatctatatactctctttgtttcatcatcaacatcaccaccagcccaccatcaccaccaccatcttcattatttcctaaacactatgcaccaggcactgtgttcagcattttacatgaattaactcaagtcttttcatcctcacaactaccctataaattagagaccatcattatccctattgcacagatgagaaattgaggcacagagaggttaagtcactcatctacagtcatacagtagtagtggaaccagggtttaaacctaggcaatgtgactccagagctcacctattctaccacatgaccgtaatgacacactactccctcatgtgcacacagccctccacagtttacccccaaattcctcatccatgactctgtgatttaaatagggggtgcatttctcttcaaagaagagcaaattgacttgcagggacagggaccaatgggcactagaactgggactcttaatgctcacctgtagatcccaaagtcagagctcatgcctcagccttgctgccccatatcctgggatgagataaggccttttgttgagtccaggaagatcctcagtctttcaggatgcagttggcagccatggaacccagccctgccctgatctcttaagacacctgggccaagccaccacccaaccaggcctgcaattattcacctgcccaactggcacccagcacactgcatccttcgtctcctggggtaggtttctacttggttcagcatgcagcagattagagacagggctgggagaatgctggtccttaggcttcctctccctgtccgcagtgtctgaggagtttgcagcactggtgggagggggctgcagaggtgaggccaacctcactgagctcccaactgaggacctcgtttgtaacatagcaaagaacccaaatataactgagggagggggtgcagtggcttcaatgtggcctagatccagggtccagcaacgtggaagaagacaggaaaacagggcagtgggactggaggatgaagccaggggagtcagaacctgcaatggaatgagagtggaacaggcttctgaatcagggacagctttggcccaagagccccctacctctcactgcctactgctaacagcagcagcagcaggaacatttgaggaggcctagcccccaccacaggcctgccaggaagcatatagtctggggaaaacaacaggaggaaggtggacaccaggatcccctatggtgaaaactgaacccattgcagacctccaccaaggtacccatatttcaaaagagtttatctaacaacaccctaaatattttaagtaatcattcattcatttccatttgtgaatattcataatcatccagagttttctggccagtagggtgaccccaccacgctggtataatttccccttcaagcaaagctccgtgctttaggtaacttgggtggcctgatggcgacttgctgaaatactaaatatagtttgagaacaattcctggccagtctgtaaccagatctgccttgttcagggctatttccccagggaacctggcacatgaaggttctcaataaacaaatatttgtagaatgaatgaatgatccctgtattagtacgttttcacactgctattaaaaaaaaaaaagcctcagactgggtaatttagaaaggaaagaggtttaatggactcatagtccctcatggctgaggaggcctcaggaaacttacaatcacggcagaaggggaagcagaaatcttcttcactaggtgacaggggagagaacaaaggaggaaccatcagacacttatcaaacaaccagatctcgtgagaactcactatcacaagaacatcttgggggaaaccacctccacgatccaatcacctaccaccaagtccctccctcaacacatggggattacaatttgagatgagatttgggtggggacacaaagcaaaaccatatcagcctccatgaagggaaactcccaattctttacttcttccaacatgagctattccctacacccaaggggatccctaccctcacccagaagttctcagcagaatctgtctgaatttgcagtgtgttaactctgccatggccacagagaggcccacgggcacatacacacatcgcatgactgggtgagcttgtgccaggacacacactcaccaggaacagccctgagagagtaggggctgcaagaatgatagcggcatagccattgctcccaactaaaatcagagtgtaaaagggaagagaatttatctgcaaaaccacagggccacagagaggtcaatgaaaaagcttctaagcttgtttacaaaaatacgcaattatgtattaactgtcctgcgatgattgcacttaacacttgtttttaatctactcactgttaaccatttaggataagaaaggacgctggcaaggaggaaagagaggacaaggtcattgattacactcttgctctcagcccattgcagatggggtaatcgagcctcagtctccacttctgaaaaatggggaagataatgatatcactaagcaaagacttctagtgtggtgccaggcatggagtagcccataagggttggtaattcaggttctaatcgtaatcatgaactcctctctataaactgtctctcagatgcctggttaagagacagcttcacagcaaggctcacaggaccaagcaactattctttaggcaaactgtatgctcatccacccacctgaagcccccagtggacccaggaaaaaaggttcccaaaatgtgccagagtagtctgaggtgtcctgagaaggagcccctctgaaataacagctttagctagctctggtctggcagggcatcaggtctttaaaaagaaaaataaaataacttcctccctgagatgaagttgttttattttctctattcccatttcctggctcctctcctgggtctgctgtttggggggtccataggaattagcaacacatagaccagaaggaagcaagaaatataactttctactgctttctgggaatcatgatctatcacatctaagagcatagtttctaagcttcagtttcctcatctctaaaatgagaaaaatgaaagtaactttttcatagggtaattgtgaggattagatgaaatcatgcatgtaaagcccttgacatagtgcctgacacttaataatcactcaataaacatttgctgtgattattattcataatgctcacaatgacaaaaaacagtatgtaagtaaggtctcagagaggttaagtaacttgcccaaggtcacacagctggtaagcagcagagctgggactcgaacccaggcaaccagagtgcttccctatgctgcttccatttgttaggtagaaacagatcatcagcttcccattacactccagagacctgggcccaggcaagagatctgggaatggtggcttgggatttttccatggtcgatgaccaagagcatacaaatgctcatgcataaggtgatcagaaccaagggaacttaaggaccatgttttactgagcagagactttccaaacccaaatagtaagtctggactcagaccccagtctctcttcttccaatcaagtgcttgcttccaaaccacacttatgagatcattgttgccccacccaggtgtggcagagcacagttcatgaatgccacacactagctgagtaatctcgagtgccttacctagcagctctgtgcctcagtttccctatatgtagaatagggataaaaagtaatttgctaggttattgtgagaaatctgtaaaaatgccagcaacattctaggagctccataaaggttagtttaatctggtttaggtttgagtggattacttttgtttgatttccttatcaggcaacagaaatcctctccaacatgactgacttttaccttaacatcattatcttcccttttcagaggattcactggcattgaagagagtgactcaaggctgaggcttaccctctctcagcctgccctttccaatgttccctcttctctttctacttcccatcttgccagctcatttttctcaccagcaaagaccttttctctccaggcccacggcatgaaccctgcgcttccaaaggaagcaagcgctgaatagatttagcaggttctgataaatgtcacgtttattttggtgccaatggagtcactgcattttaataaaggccccacctccacctctgccccagatgttggtgctggtgggaataccacacgttctgctgccacctcgaaaatgaggttccagcaagtgggtgctggaaggtgatgcggagctgggtcctgccagctccctctctggcaagggggcactgtttctgggtggctagttctgccagccaagatttttatatgcctattttccaacttcagtttcctcatcggaagaaagcggatcataccctttccactctgtgaggtaaggcaaccgacgactgtccatggagatgcttagtgcctgttgattctaattgattccaaagatctaggcccctgggagtaggctgggagaggttggctgcgagagctgagctggctaagtggcagaagctgatgtgggtggctgagccagcagttttcccatgccagagagtgagagccacagattgggccccttctccaaaggccccacccaggaggggaatcctggcctgggacggaggaggggcagggagggcagggccagatgcatagaccttcttttcatcccagcctgaagtaactggggctatgacaaaggacacatggatctggctcccatcatacccccaccctcccaccccacccccactgcagccaactccaaatgccccagggctggagaactaatgaggtgatggactgatgttaggtggcagccactgagaatcgctcccacacacactgtaaaataaaatccaccctttctttgcattttgctgagcctaggtgttctctgagttcctattgtctgtgggttttgtgctccaaaagctttttttttttttgtcataatcatgaacccaagcctgcatgaaaacacagtataattagggaaagagaggggaagggtgagaggggcagggcatgtcagagggagaggttgggaacaatgtctcacatttccataggaaaccagttgggtgccctagtagcagaatctgagaacaggattccagggcaagtagtatatttaggagtggtcccaggaagcaccagtaggggactgggcaagtgagactgggaggggaaggaagtcagtcaaggatgcatggttgagaaagttaccaccttgggtaagtaggactccaacttcctggaaacctctaggagccagtatagatgtgctcctccaagttattccatctacagggagagggaactggggtatttatttactcactcccatccatcattggccgaagatcctcattaactctatagcactcctgacccaccaacactcaggcagagagtcacatgtactggaacagagaataccaaggaagagacatcagcagcaccttctatactatggactctataaaaacagcctggggaggtggccagagcatgagttatgatgtccattttagaagtaaggccactgaggctcagagaggcaaggagtttggtccactatcatatagctaggtagctacttaaaatgaaaattatctcccttctaaggtccaacttgaccttttccctgaaactactcattgctcatcccatcccagcagaaattactgttcccttatcatcttgtctatactttagttaagatgtttgtcatgctgcattgtaataaccctttcacctgtctgtctcctctgatcaactgtgagccttttctcaagtgcctaacacattgcaaggaattagcaaatgcttgtttcctctccttcgtgctccctgcaagcacagtccacgagacaggtaagtgctctatcaagttgcattgaactacaaagtaactctagaaatgaaattgttctcaggagaacagaggcaatagccaatgcagaaatggaattccaggcaggagaactggttatgaaaaggcacagacgtaggttttgagggaacccccaaggaattgtgtatgtgcaaatgggcagcagtgagagatgatgctggagagttgagtaggaaccaaaccatgaaggtctccaggccaaggaatggcattgccacagtgcacacagggaaggacttttccaaaagcttcagtaggtccagatgagccatcaggacttcgagtgggagaagatgcttctgcccagaacaaagtcatccaagctcagaaggagatatgcagtgctagactcttgagcagatgacaaccccactgagctcattaggtaggaaaagcaaggttcaaaacagtaagcagtatgtacctctttgtgtaaaaagggaaggaggtgagaatatatttgtgtgagcttacatttgcataaagaaactgtagctagtcactgagctcagtgggattgtcatctgctcaagagtcttccagcccaaagctggcagtttctgtgatcactgatcactgtgcgtctctaaggtggacaaagctccccatgcaccacattctaggagggaaggggaagaattaggacattcttgtggttgctcaaagctcagaaaaggaattaagaaccaatgaaacagaatctcttaaaaagagaagttgacactcagcagcagcctgggcaggacttatatcactgaaaaggagggcaaagggctcacatcagctttgttcccatactctatagctacaaatggcaatgtccaatcagaaatacagggtgaaaactatttattaacaaaagtttaggtttacttcatttctctgataattggatgatacacattcattgcagaagatgtgaaatacacagaaaaacacatcaaagaaagtaaaaatcacaggaaattccatctgtagattttcttcttttttaatcactatatgtatcatatacactttccctaaaattgggattgtgacataaacacagttttcttagcttcttcattcaataagatatcacagacattttgcccatgtcactaattattaatctgtgttcatttaagaagttgttcaatttccatcatatggacactatatttgctttgctcaattccctgttgctggacttttagattatttacagttttttactattatccatatcagtggagtgaacattcttctacacacaacttttcctgagattactgggtcaaaggctatgaattttttctttttttttttttatttgagatggagtttcgctcttgttgcccaggttggagtgcaatggtgtgatctcggctcaccgcaacctccacctcccgagttcaagcgattcttctgcctcaacctcctaagtagctgggattacaggcatgagccaccatgcccaactaattttgtatttttagtagagacagggtttcttcatgtttgtcaggctggtcttgaactcctgacctcaggtgatccgcccgcctcagcctcccaaagtgctgggattataggcatgagccactgcgcccggcaggctatgaatatttttaaggcttatgacatatgcttctaaactccttttcagaagatctccatccttgtggaacagagagtctagccctgtgctattcaatatggcagccactggccacatgtgattatttaaatctaaattaaatccaattaaaaactcagttcctcagtctccctagttgaatttcaagtgctcaatagccacatgtgctagtgacaactatactagacaaagcagatataaaacatttccaccagcatagaaagctctattggagagagctgctctacactcaagagaggacaaaaaggcaatacacaaaataactaagtacagtatgttagaggaaggtatctgctatagaaacagatcacagtaagggagccagggagtactggggtggggagggtttaccatttggataaggtagccaggaaaggtgtctgctaaagtgacatttcaacagtgacccataggaagaaaggaagcaaaccatgtagattatctgaaggaagagagctccaggaaaagggaacagcaagtccaaaggccctgaggccggagtgtgtctggcgtgttcaaagaagagcaaggagactaacatggctagagtagcatgagaaggttagaaagagctaggcaatgcagagataggcaatgcagccagagagaggatactgtgagatcatgtggggccttataaagccattgaaaagactttagcttttactctgagcgagacagggaagaattacagttttgagtagaatgctgttatctgattgacatttttacaaagtactttgtgactcagttgagaatagattgtagagtagatggaggacaaaggagaaagctaggaggccagagaggacagtgatgtgataatacaggggagagacgtgggtggcatgagccctggtgatgaaggtggtgaaaagtgattggattctggatatagtttgaaagtgaagcccataggacttacaggcatggttgcaaacaatgtgaagtgttacagagaaaaagcacagggatactgtgtatcactggtgagtagaggctgcttttctaagaaagcgaccttggggccaaaatctgagatccaagtaggagttaatttgataaagattttacagattccctgtctagtcatctgcagcctcctgacaatgagaggaggggagggaacggaatgggagaggaagaggctgccttctcctgggaaaggggaaaactttgctacaaaaagctggaaacagcccaaagagtcatgttttgttagatatgtatctgcaacccaaacagctttgctcttatgggcctgtttgtcatagatcagttagtgggtagattgcttcggctggaaatggagatttagacaatgccagagtggataatggtgcccgaacgctgtcaggcgctaatcaggactcggcaatgactctgctgtgcagattgaagtgcgagcatttggagttattactcaaggcttgtctctgcaattagatgattgcataaccttaatatgatcaatcttgccggatgtgaattgtgcagctgtaaccacaaaataaggtggcatttctgttttcttgttgaacacaaacattatatatgcgcaagtcataattttataacggtcgcttttggcaagaaagagctttgtcagtcagaagatgcagttgaggggaaaaaatatatatatatgcaatacaagtgcttaaagaggcggtcataatgtcaggcttcgccttgggaaatattgctttgcgggttttgcatcttctccttttttcctttgtacacatcaattttgaggccaggaagttgggaaacttggagctcatattgagccctcccgggacaacacagctttgcactcgcacatgcaccacgttgagagtcatagggaatcagcttgatattcatcagcaattgcacatcacaccccgttcatcaagcctcattgttcagtggggacgtgagctacgacttaggctcttcagattcgagatccttgcagaaatcttagcccgccccccaaggcccggcttgagggactacagggacacagccctcaaatgccctttccacctcacaggctcagggtgcgtcggaggggatgagacggatgaggggaccaatgctgagaatgtcaagatttctcttctgactctggcccaatttgcagggggcacagaactctgagaaaggaaaaaaaacctagaggttaagagttgttttgttatgggtcgtagcttaatcttgggaaaggagagagagagaaagagacggagatggggtgggaagaagggagcaaggagatacatttaagaatagcgcagtgtgatgggatgtccagagatgaaacctagtggccaaataagtgaatgcctaagattaggtgagagcgtgtgtgtgtgtgtgtgtgtgtgtgtgtgtgtgtcagagaaaaagaaagagaggaagtgggagaaggagggggagagagagagagagagagtatttaccaatagcatctgaccaagactgtaatttcatggctgcaactaatgacaaagtcaagtgtcgaaggcttagttctcgaggagacagaccctgagatacagatttgaatacaagtttatcggggagtgctcttgggtccacatctacagggaaaggcagcaggaatgggcagagggagagacagacagcaatgcagtcacaacagggcagtcacagctgatcccaagtagaactctaaagctggacgatccgttaaagccatcccaagttagggtaagtgggtcaggttgttatagccctaccttgaccggtcattggatgtgggctgacctgggaaggagtgtgaccttggatgctaggacggtcttcagccagggcaatttctacagagggctgacagctgagagctatcagctgaccactttccagcagctggtagaatcagtccttcgttcctgaatgaggggtctgggcagtgtagtagagcatccccaataacaagtaaaggatttgagggcaaggagaaataaaattgagtggaagccagtgaatgacctaaggtgtgaaagaatcaagtgtaggccaggaggctgatgttcaggctggaggagccaatgcactgctgggttccaagacagaggcagcctcagcttgggtcccttcattccaggccccagttcccccaaaccaaccacctgtctcacttgccaaatggccaagctgagtgaaagcaaacatctaggaggcagggcctgaacaggaggcaccccatacaatcagcatcaccatctgacagctcacatttgcagtgcacccagcatgttcaggactctgtgctacacaccataaggtcactgctgtcactaccaactttcaggacaggcttaggaggtagaaaccttcaaaaggcccactggagtcagagacattgttgggatccctcataaccagtgggtgcccaaccttgtctccaactctcgcttctctccagagctccaggtgcattttcctgaaggacccccctgcttggatgtgtgaaggactctcgaactcccatgtcctaaactgccccactcatcttcctccctcaaacctgggcattcctcctgttctgtgtttcagtaaatggcactgccatccacctcactgcacagggcagaacgtgtcatctgtgactccagctccctctcacacccccacacccaacatgtcctatgggttctacctccctcacaggtctagaatccagatacctccctccacaaccagtaagcctcccttctctccaggaagcaattctcccagttaaatcttcctgccttcaaacttatttgcctcctccaatatcctctctttggggagccagaagatctttctaaaatgtgagccagatcacaactctcctctatgtaaaacccttctacatctgctccattgtcttcaggataaagtccaaatggtttcccacagcaaaactatctctctgaagcctcatttctagatatcctctctcctcgccctgcatccctccctcttcaccatagcctgtacacacacaggtacttagactctatctcgttgctgtccaatcccgagtccatgagacacacagagcaactgggcacgttgaaatgtgcctagtctaaatcaaacggtactgtaagtgtaaatgtccctggattttgggtccctgtaagtaaaatggtccctggattttgaacactcagtatgaaaacaaagaatgcaaaatatctccactgggaattttttactgattacatgtttcaatgatgatattcagactaatttatattcacatttgattaatcaatttcacttgtttcttcttacttttttaaatgtgtggacactagaaatgttgtttttaatgtgcaggttcttattatccctgggttttttatttttattctttatttttgtggatacatagtagatgtatatatttagggggtacatgagatattttgatacaggcatgcaatgcataataattatgtcatggaaaatggggtacccattccctcaagcatttatccttgtgttacaaacaatctaattatactcttcattattttaaaatgtacaattagattattattgcctatagtcactctgttgtactgtcaaatagtaggtatcattcattcattctaactattttttgtaccgttaatgatccccacctcccacttcaacctcaccactaccctcctccacctctggtaaccatgcttctattctctgtctccatggattcaattgttttgatttttagatcccacaagtaagtgagaacatgcaatgtttgtctttctgtgcctggcctatttcacttaacctaatgacctccagttccatcctgttgttgcaaatgactgaatctcattcttttttatggctgagtagtactccattgtatgtaagtaccacatttcctttatctaattcatctgttgatggacactcaggttgcttccaaatcttggctattggaacaccagaaattttttaatgacaagtgtaacccacattccatctctattggatggtgttggaagagcatcctgccattccatcaatacctaggagttttctcagctcagggagcaagaaattcccctaagaatttaaattgacctaaagtaaattatatttcagagctttagcccctgtctttgtacggttaagaggtagccagcaatggggccttcccttttcaggcactggtaagccctggccagactaaaagcagaaggaaccaaagagaggctacagagttctacacaaaaatttcaagggctgtccgctctgtgagccaggaaagctgtgcagcatgtgctggaatgaggaaagagctaggcagttgtatctctgagaattactagttgttggtagatgagtgttatgtgggagtgggtgtggcgttcatgggggtgggagtggggaattcagtgtcctcagatcagggatatggggttgcctgaacatggggagtagctggtactggactctagagagacttaaagagaatgacttttttctcttacaagaagtaaggaataggcctggcatggtggctcatgcctgtaatcccagcactttgggaggctgaggtaggtggagcacctgaggtcaggagttcaagaccagtatggccaacatggcaaaaccccaactctactaaaattacaaaaattatctgtgtgtggtggcacacacctgtaatcccagctgctcaggaggctgaggcaggagaatcacttgaacccaggagatggaggttccagtgagccgagagtgtaccactgcactccagcctgggcaacagagtgaaacttgatctcgaaaataaaataaaataaaatacaaatggcaagaaggaaggaatagaccttaagaaaggcagcaagccttagaagccccctcagagcacccttcttattattgatacactattctttctggaactccctggacagtcacactttacataattttaaatattttatcctattttgctatttctgtccggttccaccaacacttcagtaaagcctaccatcctctgatagccttgtagcggggccaggtgaaaaggaacggagttacagagagcaggaaagggaagaatggtctcctcgctctggcgccccgcattgatacagacacacctctcagactccagggatgagcaggggtccatggcacagccgggagcagccaggaggagccctgagcagggagctgcaaatgaatgggacgctgggagcagctgccaggcaaacctcggcttcctcgtctaccctggagaaaactgatcctggaagggagaccagctcttaccccatcctgctgcctcttctgcatggactgcccttccttccctggctgccacctctctcacttgtcttcgggactcagttgagacatcaccttttccaggaagtcgccacagatgccctcagtctgggtgaggtgctcttcctcaacattttttaataaccactcctgactccactgtcaccgtctgcctgcttgactcacttcctcaacagtgagcaccttgagggtaggaagcataactttgtcatcccagtgcccagctcaggctctaatacatagtaggtcctcagcaaacatttgctgagtaaataaatgacaccagagagatattggataaaagaggagcatccccctcttcaccccccatctgagattcagcttgccctggctccaagaaacttctggtttccagcttgactgtctccattttcaagaaatatccccaatctatccaaagccctaggacagaagtcgatgatgggcatatgtttgaaagccctctgatgagagagtttttcctaattcttctatcatttaaacaaactgggatcctgattgatagaggaaccatttttacaaagactgggaaaaatggcttttaatatcagtttttaagaaagaaagtatagcctctataaactgttaaacttcactttattgaccataaatctgtattttgctcaatgcaaaagtttttcatctcgtacagaaatatgctgaaacagcgacaactgctgaaaacaagaagttttctcttacgaacaatttatatgaaaaagttattgaatttctggttagggaggccaggccaggcatcttgtggctccccctcagggccaggccagcgggtgccagacatgacccattgctgatcaatgtcaagagaaaattaaccaattgtaagtctattaagttgtgggctccagggatttcagagcccagagcaaagacatgtttctccctgaggaccttaaactgaggctttctttgctcagccagcctttctgccaagaaaaggaaagaaagagataacattggagagcctctaccagctgctaggtgctttcacaagtattgtcttatttaaccccagcaggtaggctttatcggccacattttacaaatgaacaaatgcaaaattagagaggttaagaatttattcaaagcctcacagcttgtaagttactaattactttctctgagcctcagtttccccatccatagaataaagctggaagtgcttagcccacgactggcacagagtaggtactcaggaaatgtttgctagcctcctaaaatcagaaaagtgcaaagcagtgttttgaagataagtttgggtgactttaagactcatattctttccctgcagaacttgcctttttatcagtctctctgaaaccaatcaccttcagaaagtgggataattatatctcctgtgtacacatgggacaaaggagcaatattttatatttacaaaaaaagtcaacaaaagaatggacacttttacaaggacctagcaggttccttcaaagtacttcctcctacatattccagtgccagaaatttcacaattagagctatacactcttgagttaaggcgttatctcatgtaaaagtgaaaatattattggtcgagttaagattttcttaaagtcatcatatcggagctgttaagagtccccagaagtatgcagtgcaagaagaacatacaacgtacgtccagtaagccaagtcctactgattggttgtccctgcctggaaggatgtgttgaaaaagattctgaggtagaatctaggctccgtggggaaaagtgtagcattctatcagtaaggtctgctttaggcaggagagcaacttggcagaaaggcttatgaaaactctttaactgtctactaccttccactctctcctttcctcttgccacctcgcagagatacagtcctattatcccccagttcaatacccttcaatttacctgtaggacaaaatacacagcccttcatggctgctcctgcctctctctctagcctcaccatctatcactcccttcatatgttacaccctagcagcaccgaactactttaatttaccccatacactttgtgtttttcagaccgctctacctagaacagcttttctcaacctgcccaagtgacaaactcctactcagccctcaaaacctaactcaagagtcaaccctgtgaagccttcctttactcccccagtagacttaggttcttcttctccaatgccccactgcacattgtacattcccaaataaagcctttgttgcactgctagactgtgagcctcttacagaacacagcatctaattttcctctgtgccttgatcatgcagctcagaacctaggacaataaatttttgtgtgaatgaatgaattgatgaagaaataattttccctccacaatgcatatgcttgttcatcaacctttgaaaccacactgacctttcaactatacacataattctttgacaaacattaatggaggtattgctaggtacaaggagtgatagaaacagacacaattattgccctcatggtgcttatagtctagtgggaaagataggtaatatatgggaaacagccaaatagatatgtaattacaaaataagaaagatggaatgaggatgaacacagcactgtgatgtggatcatttagctggaatgttggagaagataataagaacagatttgcaggatggaaaggagccagctgtggaaactgggggaaagggattctaggcacacagaaaagatgtgccaagttttcaaggcaataagagcttgatgtggctgacgctgaaaggatgccatggaggctggagtgtagtgaaggaagggaagaggagcttggaataaggctggagagagaggaagcagcccgatcatgcaaggccttataaaagtaagaagtttggatttcatgctgagggaaatcgggagccatggaagggatttgaatccctggttcatttactcattcagtaaacattggctgatgtatgctgtgtccagatgctgggctcaaagctgcctttgaagaactctcaggtcagaggagtaggcacagcagaaagccatcactagcgaacatggtggtaaatgctgattaaagcctatcctaaaccagccaagagggattggggaagctttctcagagcatatgacaaaggcactgatcctacagaacgcacagaagcatttcaagtgaacaatgcagtggtgagctggtgccagctaatacctgcttgagagaacccaattatgtgtatttctccaactctcgtttagggacaataagttgaaagcttgaaattgaccatggtggaagcatttacacctgggaaattggaaaacgctacaaattggggtgggcttctttgcttgtttgttcgtttgttccagcacaccagtgggggtaagcattaatagtaccgggaagatttttgatgtgcataatatggagcacagaggaaggtaaggataaagtcaaaggccgtgggagtacattcctgggacaaaaagagatcttttgagtaacaggaaggcaaatccaaaagacctgatttgggatcctagatttgccattttccagtggatcatcttagcaaatcatttcatctctttcagcctcagtttcttcatcagtaatgaagattcaacaatatattatctataaaacacttagcacagtgcttgacacatagtaagtgctcaacatgaatattagtctatgattttttattaagtatttccaggataagaagacaaacattggcatcaattaagggaaaatcttctaatcacatctgtccgtgaacgcagactggaaaaggccagtcctctgaagagaaatggtttacaaaaacctcaaaatttaaattttaaaaaccctcaaaattgaaatgcccatgtgaaagagcagaagatggaattaaatgagagaaatatatgtaactttctcagcacagttgccggcaaatagtaactttttagtaaattgcaatagtggtggttcttattttcagatgggtaaaagtgaagagctcaaatgtaaagaaatcaaacttgaatttgaaaaggagaaaaaaatgactgtctatattaaagtataattttacataaaaggaaatctatcaatttcactggtaaaattagatgaaatttgacaaatgaatacagtcatgtaaaaatcaccaaaatcaagatataaaacatttcaatcaaaccaagaggttatcagtccccaccaagaggcccctggaaactgctgatcttctttctatctctacagctttgacttttgtagaattttatatagatagaattataaagcacattctctactatgtatggcatctttcactcagcataaagcttttgggattcattcatgttgctgcatttgtcattcagtttagttgctgagtagtattccattgtgtggatgtaccataatttgtttatttaccacctggtggatatttgggttgtttccagtttgggaggtgttatttaaaaaaaaaaaaaaaaaaaaaagctgctatgcatgtttaaatacaaatctatggacaactgtattcatttttcttgggtaaacacctacaattgaatttggtaaattttcttggataaaggtacatttaactttagaatcaaatactaaacagttttcaaagtgaatcgaacattttttaaattgccagcagcaatgtatgtgagttccagttgcttcacatccttttcagtgcttggtattgtcagttattaactttagtcattccagtgggtgtagtggtaactcattttgtttttaattttcattcccctaatgagttgaacatcttttcatatacttatttgtcattcacagatcttctttgataaggtgtttattcgaagcttttgcccttgaaagtgtcttttaaaaaacaaagatctttaaatttgatagtctagtttatcattttttttgtagttcatacttttgcatcctatttaagaaatattttcctaacccaagatcacttagattttctcctgttttcttctagaagttttatagttttagctctgatttatatggtaaattacattgattgatatttgaatattaaaccataattgcatttctaggttaaaccccacttggccataatatattgttctctttgtgtattgctggacttgactggctaaatttttgttaaatatttattgatatatgtttatgagggatgttggcctgtgggcttattttcctgtaagatctctttttctgatttcattttcaggacaatactggcttcataaaatggttggtgacaggttttcttcctcttatcttttctgaaagagtttgtgtaaagtcactatttttttttcataagtgttttgtaaaattgtttgtagaaaactatttaaatgtttcatagtagccattcagatctggagttttccatgtgaaaaggtgttttccatgtgaaaaggtgtttaactgtgaagccagtttctctaatagatatatagctattcagattatttatttttgtgtgagttttgggagtatgtatatttaaagaaagttgtctctttcgtctaagttatagaatttattggcatgtaaccgttcataacattcttctgttgccattttaatgtccataggatgctctctttttaagttcctggtcagtctggctaaaagtctattaaccttcttagtgtatgcaaagaaccagcatttggcttcattgatttttctctatttctctattgattcattgggttttgctctcatatttgctattttctttctcctgcttactttaagttcaatttacttttttgtattttcttgtaatggaaactgacatcattgattcaaagatttttttttcccaatataagtgtttaatgcaataaatatctctctaagcacagctttagctgcatcccaaaaattggatgtttctatttgctgtcagtttaaaatttttactttttaagtttcttctttaatttatggattattcttaatgtgttgtttaatttccaaatattttgggaatttccagatatctttttgttattgattagaagtttaattcttttgtggtcagagaactattttgtataatttcaattctattacatttattaaaatgtgttttatgacccagaatatggcttatcttgatgaatattctgtttaagcttacaaggaatctggtattcttctggttttatgtggtgtgcttaataaatatcagttagaccaagctggttgattatgttgttaagatcttatatatcttactgatttactgtctatttgttctatgaattatcgagagaataatattgaaatctccaactataacggtggatatgtctattttcctttcagttctagtcatgtttgcttcaaatattttgaagatctgttattaagtgcatacatatgttggattgttatgagctcttaaagaatagattcctttattgctattaaatggctcttttctttcctaatattcttctatggtctgaagacatatgtccccccaaaatttttatattgaaagcctaacccccaaggtgatagtataaagagaggagccttttgggacctgaacaggtaatgaggccagagccctcacaaatggaattattgccttataaaagaggcccaaggtagcttgttcactcctttcactaaagtgaggaaactgtgagaatgtgctatctatgaaccagaaaataatgaccccttactagacactgactctgccagtgccttgatcttagactttctagcctccaaaactgtgactaataaattctgttctttataagctcccagtttatggtattttgttacagcagcagaagttgactaaaacatattcctagctccgaaatctactttgtgaatgttgttgtaactactcactttttttctaattgctgtttgtatgaaataccttctatccttttacttttaatttatttgtttctttatacttaaaatgggtttcttgtagagagaatattcctggggtcatcttgcttttttagtcagtctgatcatctctgccttttattgtttgtttgtttgtttgtctgtttgtgacagggtctcccctgtcatccaggctggagtgcagtgacatgatcatggcttgctgcagccttgaattcctggcctcaagcaatcctcccacctcagtctcccaattagccagaattccaggtgcatgccaccatgtccagctattttttttagagacagggtctcactattttgcccaggctggtcttgaaccactggcctcaagcaatcctcctgccttgacctctcaaagtgctggtattaccggcataagccaccacacccatcctctctgccttttaattggagtgttcagagcacggacatttaaagacattattaatataggtgtgtttaactctaccatattgctatttgttttctatctgtcccaactgttttttgcttctttttcttctttttctgccttcttttgcagtaattgagtactttttatcattccattttatctttattttttgtttctaggcttagcctctctgttttgttggctttttttcttttaatggctgctctaaggtttaaaatatacatcttaaattatcatggtctactttcaaataatattacaccacttcatgtatatttttagaaccttacaacagtaggcttccattttcctatttgtgttttttgtcttgattttattgctatattataaacctcacaacaaatcgttgttgtttttgagaagtcaattatcttttagataaaatttttaaattagaaagaaagccatatttgcgattgtcggtattctttatttctctgtgtagatctaaatttacatttgctattattttacttcttcctaaagaacttgctttcttttagtgatgacctgatggtgataaaatcttttagctttggtttgcctggaaaatgtcattatttcatttttattttcactagatacttttgctgagtataaaattttaggttgagagttttcttgtttatcctttcagcactttaaagatattgttctactatcttttagcttgcatgatttctgacaagaagtatgatgtaattcttatgttcattcttttttttcctctggaaagaaatgggtatagcaatctttatagctcatacagggcttggaatagttcatgttttcctcatccatgtatattaggaattctttccactgtggctgatggaagcacaaactgtttccagccctgtatgagttataaagcttattcctttccagtggttattccccagccacaggtagcttccttatacatacttgcagatcattaatcaattaaagattcaaaaaatccttctgtaatcaatatctctctctctctctgtcacacacacacacacacacacacacacacccctacatgtgtactctctctcactctttctagtagtttctccctgaaaattctagcaaaattggcctccctgaaatctaaactctgtcttctcaactcagtgaaatctctggtctctgactgggttttgcttccctgcactagtttgaagaactctccaggaaatgatctgaaacaatcataggcctcacctcatttgcttcctttctgtaaggaatactgtcctgcactatctgacatccaaaatctgaaaactttaatttatttgggtgtttaattatttaaagcaagaagggaaatccagtcccatcatgaccaaatcaaaaatctccccaggaggatattttaaaacaacagaacacaagaaaagatggacaaagtaagatggaatgcaaatagaacaacataaatgattaataaacattgttgagttaaagttaaccagtaattgactaaagacaatttaaatattttattgggagagatagccgctgcctaggacaggaggaaaaggaagtatagtcatgctagcaatacctctaagtttctgaacatgtcgcagcaaaggaaggtctgtggaagccagtcagccaagattctagtgaaaagatgagtcaataagctacaacgatcaaaaagaaaaagagatgtagatgctcatttataggaaagaggaaagtgagaaagaagagaattgtgacttaggataaagttttccagggaaaatagaaatggccacaacttctgaataagatcaagaatcatgagatctgaccagaaggtacagttccctgtggaaggaagctggttgaagaagtggaagaaagcattgaaaatttaagtgtgttcagtcattaaaccatggataccaaatatgtaatattcctactgccatttctctctctcttattcatgacagacattactaaacaactatggctcttgcatcaccaagcccagaggctgcctttgaacatttctacatatcatcgtaggcagcttctaccaattgatcacggttggcttctaagtgaaaatccatttttctcaccagttttaggcacttttatgccatttttgtgatagtcttgttcacctagtaataggggaaaaatgaaaatatgaatttctaagtaatcaagcataaatatgtacattatttggctcttaatacatatgcataacatttatatatgtttccataaatatacaatatttttataattaaaaacctattaggatcaaatgagataagaggtgggagaataccctgaaaagagcaaggttgtgtattttagaagacaacaccatgggacctctgtcatttgtcatctgctaagattcaggaaatctgtgattgatctttctggatttctgataaaattttgtatcttctgcatgtctaatcgcctccacagctatatacaggatgatcaactatcctgggctgcctgtgataaagagctgtaggatgtaggacttttagtacaaaaactgggaaagttctaggcaaactaggacaagttggtcaccctagatgtaggtagggaacaaatcaagcagttctcacctccctgggatacaagtcatggaaaacttaggatcacagagggcattggtttttatcactgtccaaacctaggcccccagatccccttctttcctacaggatcccagaagagatttcacaccacacccccactctgctgctgctcctgccctccctccctgccctccttccctcaggtatgttttgagccatagaagctctcctgctcctcccaagtctagagtattttcacccgtcaaccaatgaatacagctcttttcagcctccaaaaatcagccaagttctccttgtttttttaccagcctttcctctcatgattgtactcacctcctcctccacaacactttttaacaaagcaaaagagaaaaacaaatgaataaaaattttaaaagagagtgcctattttgtaacagttcctgagctggctgcttagatacggggcacaaagataaataaaatatggcccaacccttaaggagttcagggctaagagcatgagggaggtaggaagatggatggtacacaagtaattataataaaatattataatagctaatatttattgagagcatacttttgtagcagacactgtgctatgtgctttaaatgcattatttcttttaatcctcacagtagccctaggagataggtgtacgagtattattattcctcattttctacctgagaaagctaaggcttaggccagttaaatcatctgctcacagtgctagcaagcactggagctggattcgaacctcagctaaccacaaaactcattctgttaactactgtgttctgctaggatgcaatccaaacaaaatgttgtgaagactcaacggagggagaatgctctctctacctggtagaagagcaggcaggaaggcgccacagaagtgacttttgagttatatctttaaggataggaagttcaccaggtggacaagagggggagacaaagggcattggctcacgagagagctcctaatattcagaggaaaagtgattttctagcacaatgattttagccatggatgcatatggggagagctgtgtcaaagggccaggggtgagggacagaagtcagatcttgagtgctttcttgctagggtgctttcttctaaccccagaagtgatggggagccatggaaggtttttaggcaggagagccatatgattgtctttagaaaagtcactgtggcagtgatggatttagggtgggagatctgaaagctgaaacaattagctaaggaagggccagtgggattaatgagagttaacagattcaagagagatttagtaaggctgggccttgtgcctgattggccttggggaatgaaagtaggaaaggtggaaaggcaggatatggagaataagagaattcctagcctaagagaataagtgaatggtagtgtcatttgatgtgagatgaacagaggagaagcaagcttagagagaaaagtgacactggtttgaggtgtctgtgagatatccaaatggagatatctaacaggcagttggatatagagtaagagctcaggagatagggtggaactgaaatcacctacctaggataagattcttgggaacatttgagtggtgcactctcatgtcccactttaaagtgccccatcatgaaataacaaccaagaccccaagaaccttctcccatcactacatttttcttatccttccagatgcccagtggagggtggagtacattcacttaagccccaaagtcttacttaaaactttgaagaaattcctccagaattctagaggccataactatggtaccttcatttccttgcatcttcacatgtttctaataattttttagttagaaaaaaagtaagtcaagggaatgaacatggattcagcaattatctaagcaagggaccaccctgtgcatgggcactttccatgagttaactcaatcaagcagtccttacaacagtcatgcagtcttattttccccattttgtagatgagaagtttaaggctcaaagaggtctcttagcttccttaaggccacaaagcaaataggttgctcaggtatgttttgaagccagatcgacttcatcccaaggccttagccatgacatcatgactcccaaatgtctgccacaaagtactgctggtctataatcaaatgagccaaatgtcttatactcttgcatgactattaaccaccttttcttgagatggacttttctttgaaatcatgctcttcctatgggcaggaagcattaaaacgattctgctgcaatacggttgtttgatttctttgtgcttcatgtccttacttggcaaaataaaaagccggcagctggccgggtgcggtggctcacacctgtaatcccagcgctttgggaggctgaggcagggggatcacaaagtcaagagatggagaccaccctggccaacatggtgaaaccctgtctctactaaacatacaaaaattagctgggagtggtggcactctcctatagtcccagctactcgggaggctgagataggagaatcacttgagcccgggaggcagagcttgcagtgagccaagatcgtgccactgccctccagcctggcaacagagcaagactccatctcaaaaaaaaaagaaaaaaaagaaaaagtaaaagaaaaaagaaaaaaaagttggcagcctcgtgttcgtcctcaaaatattcttttaatattccctggtccatgaagtccaaaatgttggaaactactgtaggacctcttgctgaaaccttgacgtttgaaaaagagcagggataatccagcccatcattgtgactgcatatgggggtagcagagacacatgggattcttgctgtcttagtaagggccgcttcacgcctgccattccagggctcaaaccaagaatgaattggcaaaagcctttacatgcactagcagcttgctgtgaacccctgagattgaaaaaagcttatcctccaaatattttttttttttttttgagacagagtctcactctgtctcccaggctggagtgcagtggtgtgatctcagctcactgcaacctccacttcctgggtcaaagtgattctcctgcctcggcctcctgaatggctgggactacaggcacacaccaccatgcccagctaatttttttgcgtttttagtagagacggggttttaccatgttggacaggatggtctccatctcttgatctcatgatctgcctgcctcagcctcccaaagtgctgggattacaggcgtaagccaccatgcccagccccaaagatcgttttttaaattccattccttgttgttaagacaagatggtgggaattaagagattaatattaacaaggaatctgatgatatgcgttttatatcctctctgtcccagacaagtgctctacccagagcccatgggaggagaggttttctctaaaatctttgaggtcaagaaacaggactattttgggattccaggattgaaggctcctttgctgttccccagccatcaggtaggagccctacggtgctctgatttttttctcctctgtctggctgtggctttctgtgctcgagctcttctccctttccttcctagagaagagtctgcatctgtggggcaacatgcaacaactactgagaccttaagttaagtgctaggcactgtactcggcaatttcaagcaagccatttcaactcatcttatttattttttattgcttttattattttaaaaataatgcatgcttattttattttaaaaaaaattttaaccctacatacatgaccttggacaagttacataaccttcagtttccttgaccacaaaatagggacaagaaccaaacaatattgtgggtgaaaatgccccattttaccttcagagacaatcactattaatactttggtggatatacccaaggcactttactatatatttatcaacatttattactaataatttttataagaatggaatcacttacacaattgcttgtgacttgttttctcaggaaaatatttgcatgttaaggtacatatacctgagaatcaggttttatcaacaaactggtggatgggaaaactgaggatcatggaggttgtacagtccaaagagtcaggtaatggaggcaaaactcaaatttcacacccttgctccaaaacccttgttttttctactaaatctcaggttcttagaaaataaatcacagtgggaagagggtccaaccccaaacaaggtgagactctgggggcaaaaatcatacagtctgggggtggtgccatgtagtggcagcaggatctagaatgatgtcagaactggagtcagaaagcctcagttttaagattgacttatactagtttatgacattaggcagttgaataacctatctcagcctcagtttgctctgctataaaatggaaataagaatagtgtctgcttcatagcattgctctaagggttgaataaagagaacacatgtaaatggcctggtacatttctgaaggtcccatcatgtatctggcactgtgctaggctttggggattcaaagacaagtgagacacagttcctgacctcaaaggatcgacagagaagacatctgtgtgcccccaaagtgtcacaggggctgatgtagacacctggctggagggtcttttgggggcaaaaaagaggacaggtaagcacaaggagaaggaggatttggatggttaaacaacagaaatttatcttgtcaccattctggagcctggaagtccaaaatcaaggtgtgtgcaggtttggttccttctgatgcctctccttggcttgtagaaggtcatcttctctgtaccttttcacatcatcttccctctgtacatatccaaatttcctcttcctgtaagaacaccagtcatatcggattgcagcccatcctcatgatctcattttaacttcattacctctgtaaaaccataatctccaagcaaggtcctatttgtaggcactgggttgggggttaggactctagcatatgaatttgggggaggtggaggacacatttcagcccataacgaaggcacactctacacagaccttctgctgctagttttcaggagtggtttgtctttctggtcagtgttgtggtcttctctctactttgcatctcactgtctgttttcactctccctaccttccttacccaattgaggcaacaaaggaatcctccagagcttttagactacagtataaagtatcaaagtccaggctcagtatacagtggcctcatggccaaatctcatgcctccaacccaagctgaaggaaaggaaggagagagtagatcactctgtattagcactttactgtgagcctgtggctttcccgtgccttgtcttgtgtgatcgttactacaaccctgtttataaagacagaatcagagaagccaagcaatttacactgtgtcacaaggctggaaagttgatggagcaggattcaaatccaatctatccaccttcaaagcgtatgttatttatttactccactttccttgaagagttcctatccctaatctccaagaaatgtaggcaaatgagagagattccaaaagtctggagcatgaaaatcactgccttcagtgtaagtatagattccaaaaattgtagacttgaaagtttggcaaatggagttttcagaaaattcactgagatgttctctgttttccggcagcttctctatctcaacccaacccagttcccaatctcccctgagataaggaatctcaaagattggagtcattctttgaatggaagagaggaaaatgctgcaggagcaaacacaaatgtgacaacagccctcgtaagtggtccccttctcttgctcactctggtatttcttcccagagcagccaaagggtctttcaaaaaggcagctctgagcacctcactcttctgcctgaattcttcagtagcattgcactgtcattcagaataaaatgcaaatttttcaccatgctcaccaaggcccctttccatttgccctagacccagcccctgtcttatctctttctgcatctcttttgataaacacacactccagttatatctgagggcagggaccatgccctcccctgccagttcctagaagagagaaggcactcatcaagaactgggaaataagtgaatgaggggaaaaaatgaatgaactgcaagagagcaatgtgggtatttctggcttaatcgttctcctccaggtcatggctcagggctgagagcccttccacctgtatctctggccttcccgagatccttaaagtcctctccacccagccagcagatgaagaaagagaggatggatctttgcatggggagctgtagggtctggaagcagtgtacatcactgccatccattgtctatcagccagaatcagaccatggccccatctagctgcaaggaaagctgcaagcctaggagatagaggaattgggactgggtagacacatggcagactctggcaaggcctcagcgttttccatccacacctaactccaaactccacaaaagcctcctcagcacttcaccagagtggactcttcttctctcccctgcctccttgtccacagccctctagcccattttctctgcgtcttgacctttcccaatgtaaaactgttcttatctgtgtcataagaggtgggaggtaagggagagagcagcagcatcatttccttggagggcaaggcatgaactatccccctccgcaccctccccctgcccactcccaacacagctgtcttagtccatttaagctgctgtaacaaaataccatcaactcggtggcttataaacaacagaaatttatttctcaccgttccggaggctgggaagtgcaaggacaaggtgccagcagactgggtgtctggtgagggcctacctcctcattgacagtgacttctccctgtgtcctgacatggtggaaggggtaaggcagctctctgggacccctcttataagggtgataaccccattcatgggattatcatgaagtctccaccctcatgacctaatcacttcccaaaggccccacctcccaatgccatcaccttgggcgttaggatttctaaacatgaatttgaggagtggagggacacaaacattcagactgtagcagcagccaggtgtcaggtgggcacacagaggagttctttgcagcttccctcacaccaaggtctacatgtgtctagaccacatcaccagccagactggccacatcagtgtagatatgtgttgcacaagaatgtccactttctaccaagaggcatgggaggttggctgacccttccccacatgccctgacagccccgctgataagagggagcggagggactgaaatttcactttctcagaaacagcggattcagcaactgtggctgctacaggagacacagatctgcaccagcttaatttctctcagcctttatcaccatacacaaagcaagagctattatgccctgtccggcggccaaggactcacctcgtctggcattggggaaatgatatcttagcctgcagggccccagacagcttcttcttccaacactattgtggctggaaccctcacctgcccgggggaagctgttcccatgcaggatagacaccattcttgccatgtagggctcctggagaagtctcttctagaaactgagccagctttgggccccatagagaggactgtaacagagctaacatattctggagacaaacccccatctccacacttgcctgagccctgagaagttggggggaaaagcctctccaggagctcctggaatagtttgagctgctgctgagaaggaatgactgccttccgggggggatttagtctccacacttggcgatcctgagtccgtattaaaaatgcaagactctagtcagagcctaccagatcctgccagccttggttgggaccctgaggctgggtgaaggaaggtgaggggaatcagggagacagggaggaaggatggtgcctccagcaccacctatccacagctgatctcctgcctccaggactccatctcaatctggggctgagcttctggctcctactgtcagggatccctgaacagtccatatattgtgtgcagctcacctttgccctagcccctcctcactcccataatccaaatccatcttctcctccaccaccctgtcctttccctacagcctgagaaaggaccctcagtttacctggtctgaggcatcctccttcttatagcttcaggcgaggatccatagggcctgtctgttcaaacccacttaccgagtcccctgaaaagtcctaaatatttttatttcttcattcctttgacaaaccctctctgaacccctaatttgtacacagccccatgctcagttctgaaggtaaaaatctaccagtacctactctctgccctccagaagctcttaaactcaaagaaaggagataaatgcaaaaacagtgacattaatgaagtcgtgttcaatattttttgagcacctactatgagccagaccctgtaaaatatgcaccacaatataaagatgaatatgactcagtctgtggagaagaaacgtcagtatactatctctcattctgctgcaagttcatcccaagaaactatggagagcaaaaaccacccttgctccaaaaccttccagggggttgtttgtctgaagcatggaagacattttctgatggttgggagttttctagcagtgctgttggtgcctcacttgtgtctgtaaacatcaaagcttcttactgcaagtacttgagatgctctcctgcgcatcttccctggcctaggtagggtagaccagaagaaccagagaatttatgtccctcccaccccagaccagccctcaaccagtgatgggaggaagttagcaactaagtgttccagcttaatctctcccagtggcagagggctagggcaactctgaggtgtgttctgccttgcagtccccagcaagatggtgtcccagttgcccaaagcaacaacctgctcattaattcaccttatattggcttccattccttccctgtcttactcacaactcccaacccacgcttcctgggatcaccttccaaataaaccccttgcacctgaattcttctgtcaaggctgctgtgggaggagcccagcctaaggaagattctgaaggcgtccccacatcctggtctccacccacatggttctctgccccagcgggctacattctcttccttaagcacaccaaaggcattgcctgagcttggactgcactgtggatccaacctggagcctccaccccagcccctccatacaccacttgcaaacactactcaaagaatcctgtaggctgagagagctagctcatgcctgtaatcccagcaccttgggaagcaaaggtgagtggaccacttgaggtcaggagtttgggaccagactgcccaacaaggtgaaaccccgtctctactaaaaaataaaaaattagctgggcatggtggtgatgcctgtaatcccagctacttgggaagctgaggcaagagaattacttgaacccaggaggcagaggttgcagtgaaccaagatcgccacaccattgcactccagcctgggcgacagagtgagactccatctcaaaaaaaaaaaaaaaaaaaaaaaatcctctatttcctctaaggcaagttcaacttctgttgcttccacagagccattccagccactcctgccctggagcagtaatgcacatgtatatttgtaggtgtgcacttatcatctctcccccatcccagcatgctgagaacgctaacccttgctgcatagattgaagaaagacacagggatagttgtggggcggtgtgggggtgggggtgaaaatgctgagaaacatgtgatttctttacttctaaaaccctttcttgaggaagagaaaaggatagatttaggagagggagagaaggggccagagccagaaagggttcagtttgagaaagaattgggaggtggtgtgtgggtgaatgggagatgaggcggaacaagaggagtcagggatcattctcagcctgaaatgattggctttggggagaaaatgaatttttttttaagttttgcctcctgtgaagccagcctctctttgctactttttgaggcttccataaaaagatcctctttttttgtggacgttggcaatgccacggtcacaaaacgggtcagctttatgcgaccccacatcttgaaatctttaaatggaggttaaaatctctattttcaccagaaacagaggcccaatcttccccaagttcctaatgacttcactgtccaattgtcctgcctccctctttcctgagctgagggacaggaggggcagtgggtgtcctgggcgcatgtccattctcctcaagccggagccagcgacgcccacaccctcccagcccctggtcccagccctctcccacctcaccctgagtctgacaagccaccctaatggattgaccgtggcctctgctggaggggctaaatataaaactttcctgcgctcctcttgtcaaagttaaaagcttttcatgtctgtgttaatgtttttttctgtctgctggctccagtgacagatgcggcatcttgtgctgagtaactggagagtgaatggctggcaggggccggggaggtagcggtaatttatctccaagagtttaagcaggatgacatggctgggaacagaaggggggtgaggttgtcacctgattactaattccaagatttctcctccaagagggaaaaggagtgagcgaggatgaagggtacaaaaagcaaatcaataaacaggttagcgtctgcgtcattattaactctcagcctgtcagcaccccactgaagcgatcgcttgaggcggcctcggatttaatggtcagtgcaatagatttactgtaaatgttatcagaggcaagggcgggggcacggggcttgaggaggccttcactgacaaatcattggattgcacctggatgcatgaagccatttctgaacatgcataaataacctagagcttaggtcccgggtggcatttcctccctcggatttaaatgctgctactcgcctttctctgtattcttggcttccaaaaggttcaaacagccaggtttcccctaaatctttccaggggcctcatcttctggccctcagcaaatctgagaaaggtcaggcagcaagtctgcaccaggagcctctgggatccaaagagatcagcgagccaggaaacagcccagacccaagaaaggcagccagccaggagtctgaggcttcgctgcagcaggtgagatgcctctgaaagctcagtcctaaaggaagcattccctgagctcagcatctagggactggggatgccttcttgaggttcctcctgacctctccagtgagcctctggagcctcttcctctgagcctctcacctgctatgcttactaacaacaaatactggtgggagggcttttgactaagatcattcatcagaattcaggttgctatcctaccctcatgccaggagtcatggcagaacaagaatccagaagcaggtagagacagcagccaaagagcatagtaaggtagcctactgttttcaaaagcagggccactgtgtacagttgttcaggctgtatactgcacaagtctaagggatgtcattcacaacaaatctatgggaatggtactctctggagctgtgcagcatgacaacttcacaggcatatgcaacagtcccaacaaagaggcagtgccaggtggacaatggagagaagcaacctactacagaagtgaacactgagaatctttccagtagattccagttgaaatcagaggggacaagacaagttgccaggcataggttgtctaaacagttgggagggttttaacagtgtcctaggaacttggactattgagaactgcttctgctgacacttgaatgagaaaaagcctgtgggaacattagggaatgcagattttgtcttagctacactgaccataatctttcaaaccaaatacgcaggatttttgttctactgatggtgatgaaaagcttggatacaaaaatactctgctgtctcaggcattgagattgttcccggggtcagaggcagaacacatggcatctggactctcagaagtaacacaatgagatggaatcaaggaaggggccgactcaagaccctctctctcctcatctcagacaaggctggtgttagcttgagatcctcccaaatggagtccctaagacgaggccttggaaggaggtctcttgactgggaggtgagcccagaaagcaaaagtgagagagaaaagccaactaagggcaggttgatggtcatgcccagggcattattccccgacacacacttcaaagtggggcctgttggaggctgagcaagttcctctgggaccagggaaagccccaaggcatgggaaaaaagagactcttaagcaagagataaagggaactgtccacagcagcaagtggatgcggggatgggggggaccacgggtatctgaggggaagacatcaatcacatcttctataggacccaacctcagcatccaccaggcctgcctgaccacccgccctgttcctctgctgcagaaacaccaagtgccttggaaaaccacggctctgtttgggttcgccggctgccatctcccgtggaaagagccaggtgaatctgaaattagagccaagtatgccttgaggactttccagccaatctgatgctaagaaagatcctttgtccaggactggcccatagtggcaggctcggagacatttctttgaggctggggggacaaatccctagctatgtatgcagaaccatttatgttcatggtccacttgtgaggccggcgttgtgatctactttttcctaataaagatattgaggttcaaagagatgaaatgatgtgtgacagggcacacctacggggcttcagtcagaacccagtggcaccctaaagctgctcccagggtgaaagtcaccagtagcagtagacccttgaaagccatctggggatggctatagcccaaattatatccctgcaggcctaggagtgggggtcacttttctctgttgctaatctccaggggtctcgaattccctgttggaagtctccactcttccctcagtgaaaccaattccctgttttaaattcctcagcgcttttgaaccaaagtgtttgaaatccctagagtgatttctgttctcctgtgtggctcctggatgattcccagccctgtctaaactattgccctgccccaaaatcttatatgcccttccttgcttagcatgatcactgtccaacattctatatattttactgatttctctcatttattttctgtctccctcactaaaacaagaccaggaactggatgcagtggcagtagtagtagcagcagtcccagctacgtgggaagctgaggtgggaggaccacttaagcccagggatctaagacaagctcagggaacatagtgaagccctgtctcaaaaaaggcaagatgaggattttcccgttttgttcactgctatatccctagagccttaaacattcccccagcacacagaagatgttcaaaaagtatttgtcagataattaaatgcacaacatactggatactccattttggacccagactggaacgtgggtgcctcatgcaggttcccattgctgactcactccccagcccagctgcccttctgtctccatgctctggaactccatgcccaatgccagtcacccacctatagtctcctgacacacccagtccatgtgggagtgcagtcagggggactcaccggggataccagtgacctttaccaccctgccctggaggaagcacagaaagccagagagaagcaggacagaggaagccagtgaaaggcaagtcaagctgctgggctgttccagccctgaggggcttggtgtgtgcatgtgtatgcacattctcacacttgcacacaaacctagtgctatggtttggatgtgtgtgttcctccaaaatgtacatgttggaacataaatcccaaggcggtggtattcagagatgaggcctttggggaagtgatgaaattgtgagggttctgccctcatgaatgggatcagagcccttaggaaagaagctgcagagagctgcctggcccttctgtctcttctccgttgtgaagacaccaagagggtgctgtctttgaggaatgggtcctcaccagacaccgaatctgctggcatcttgatcctggacttcccagcctccagaactgtgagaaataagtttctattgtttataaattatccagttcaatgtattttgtttaagcagtggaaaaggactaagacacctacacacatgcatgtgcacacacacacacctacacatgtatgcacacatgcacacacccacacttatgtatgtacacctacacgcatgcatgcatacttatacatatgcgcatagctacatgtgtgcacctgcatacatgcacgtgtgggcacacatattgcacacatgcatgcacactcacacacgtgtgtgcacacatgtgtaccattcaacacatacacatgtgcacacataccatgggttgcatgtgaagaagatgaaggaaaagatctaaccccctctccacagtcctgtgacttactaagagctcttggaggcaggtaggaaaacctcttcctttttatagatttactgttctgactctgaagattaacatagatactctggcagggggtcatatagctgtggctggtgtacgtgtgcttgtgtagatgggggtgtgtttaggtgatatgtatgtgatatgtctgtttacatctgtggtatgtttgtgtgtatggtgtgcatatctatgtgggtaggggtgtgtgtttgtgtactatgtatggttgtcatgtgtgtccacgtgtgtctctgtgcttgtgtgcattcaatatgcgtgtttgtgtggtttgcatgtggtgtgtgtggcatgtgtatatgtgcttggtctaacacacagaagtacctgccactcataatgaaaataacaaagggtaccccactaggacagcccacccagatgaggacagaactgggcccccaaagcacccccaaattgtgcagtgaggactggagcattcaaggccgtcactgctgactaaagccaccaggggagctactccctcagactcagtctgggggaataaactccagggaaaggggatggggcctacagacagagtgggtgggggtgtctgaaaggtgggtggaaagtcacgcaggtaacctacaagaagatggctctctggaggagagggcaagcccacagaggcccacaagggacccagttcaaaggcacttctccagagcttctctccggaagtgggacagagtggcccttggtgaaccacctatgtaaccctcctctcataattcctctaaggagccctgccccacagcatagaaagtgggcaacgccacgcaggcctgctctagtggggaaggtgaggggagctggcaacagagaagtgaggcccactgcagcccccactccctgccagcacccaggccacagcatccctggaggggatggtgtccaggtggtgctgccccacacagatgaagggtgcccattgcaaagctgggaggggtagggaagaaggcagacccgtggataacttgggtggaaggactgtaggacccgaaatttggccgacatatgaagcctaggagtgcctcccaggggtcagtgagctgcaggggattgccagaagtgtcagacaaggtgacctcctcccccacctggcactggtctccttatgggcccagaacccccaccagcctcccctcctgagtggggcagcagctgagccaggacatccttgggggatgtgccaaacaattactttacttattgaatatctgattaattattcagaaggtgaatcaattattcatatctcatttaagcaagggggaaaagccactgccccttgaaagaagcttctcagcgcctcccaaggccctggggacggagtcatcagcgggagaaattgtcacagcaggaatgtgtcactggcgtggctgctgcaaccaccacgggcctcctcctgcacacaccgtcacttgtgcatgcacacacccgctcacacttccacacacacacacacagagcactcagatacataaaagggaagaagtgtggatcacacagaggaagagacagtccctcagtccatcagggaaggtccccagtaaaaatgacatttgagttacgacttgtcagaggaaaagacagagaaagtggggaagggtagtccaagcatagggaactgcaggagcaaaggtgcggaggcgtggaagagcaccaggcacccgagggcactgggatgggagagggatggtggcagggagcagagactggatgactcagagcctgggcttacccagtggggagccagtgagaatgtgggagtgcccctgtgggacactgtggctgaaatgggcttgtggggcctgggaccccactgggggaaagggggtcccattccagacactggtttacaacctcctcacctggctctgtccagggcgccctttggcaagaggccagagaccatctcagcaggctcatgaatcatgaggcttttgtaagtggcaggggcttcgccatttttccctccaagatttcccaatccaaggggaaggtgggctggggttcccccaaccaaggagcaagacttactgaccacgttttacggatggagaaactgagatccagagagaggaacgggctgagcctcagtcactcagacccaggaccagaactcaggcctgcagcccccaggcttagcagtacaatgcaggctgagagggtctgtgactgccagccccacctcaatccaggccctccctgagccctcagatggaggccctgcgcaggtacctctgcaggaaggtctgagcagggtaaggtgttgcccactcccactctgtctgtccctttaccactcttcttctctgtctttacctctctctttgtcccttgctcatttacttgctctgtgtgtttatggcagagagggtggggtgggggttgactttctctctctccactctgtctctgcttctcccatcttactgtgtcttcgtctctctcctactttctgtctctctctttctcactctcttttttctttctctctttccctttcctctctctctctctctctctctcattcttggtctctctgttacccatctttgcctttctgtctttctttttctccctcacattctctatttgtctctttccctgtctccctcccttttctctcctcccgctttcctctttctctttctttctgtccatcccaaggctggtccagggctgggatgcagcctcttccttcccccagcccttcagcctgaccagacccaggcaccccacacccactaatcaaatctgcgacctgattcaattacacccagcaaaaatgcagacgtgtaaccttgttaatatcacatttattagagggaggggaggagaaaattaagatagacttcgtgttgctgctaattagaaaaattgagactttacatctgcgtagcgctgagcaacatgtggtggtaacagatgtgggctcattacacagctgcacggggcggggatgggggcggcagggtgggggtgttgtgtggaaaacattcccaagccagcagcattctcgagctgtagccccctccacccagcgacccaggcctgattgacacccttaggaaaggccaggacccaggagaggaagcgtgtgggacagcagctgagagctctgccctggggtcaaaccctaactctagcatagattagctgtgtgacttggcccagcccttaacctctctgtgccttggtgtcctcatttacaaaatgatactatggacccca
